(19) United States
(12) Patent Application Publication
(10) Pub. No.: US 2024/0174992 A1
(43) Pub. Date: May 30, 2024

(54) SPLIT MODIFIED DEHALOGENASE VARIANTS

(71) Applicant: Promega Corporation, Madison, WI (US)

(72) Inventors: Michael P. Killoran, Madison, WI (US); Evan Glasgow, Madison, WI (US); Lance P. Encell, Madison, WI (US); Thomas Kirkland, Madison, WI (US); Rahele Esmatpour, Madison, WI (US)

(21) Appl. No.: 18/312,117

(22) Filed: May 4, 2023

Related U.S. Application Data
(60) Provisional application No. 63/338,323, filed on May 4, 2022.

(51) Int. Cl. C12N 9/14; G01N 33/68

(52) U.S. Cl. CPC C12N 9/14; C12Y 308/01005; G01N 33/6845

(57) ABSTRACT

Provided herein are peptide and polypeptide sequences that structurally assemble to form active, modified dehalogenase structures capable of binding to a haloalkyl ligand. In particular, provided herein are split dehalogenase variants that assemble through structural complementation into active dehalogenase complexes, and systems and methods of use thereof.

### CROSS-REFERENCE TO RELATED APPLICATIONS

[0001] This application claims the benefit of U.S. Provisional Patent Application No. 63/338,323, filed on May 4, 2022, which is incorporated by reference herein.

### SEQUENCE LISTING

[0002] The instant application contains a Sequence Listing which has been submitted electronically in xml. format and is hereby incorporated by reference in its entirety. Said xml. copy created on Jan. 25, 2024, is named 39886_202_SequenceListing.xml and the file size is 3,224,550 bytes.

### MEGA TABLE

[0003] The specification includes two lengthy tables. Table 1 and Table 2 have been submitted via EFS-Web in electronic format as follows: File name: TABLE_1_SmHTs.txt, Date created: May 4, 2023, 2023, File size: 64,623Bytes; and File name: TABLE_2_LgHTs.txt, Date created: May 3, 2023, File size: 2,108,573 Bytes. The content of Table 1 and Table 2 is hereby incorporated by reference in its entirety.

### FIELD

[0004] Provided herein are peptide and polypeptide sequences that structurally assemble to form active, modified dehalogenase structures capable of binding to a haloalkyl ligand. In particular, provided herein are split dehalogenase variants that assemble through structural complementation into active dehalogenase complexes, and systems and methods of use thereof.

### BACKGROUND

[0005] The utility of self-labeling protein systems, such as HALOTAG and its chloroalkane-based ligands, has continually expanded during their lifetime as research tools. Genetic fusions to HALOTAG as a general strategy have enabled a broad range of applications including fluorescence labeling for cell biology and imaging, recombinant protein purification, biosensors and diagnostics, energy transfer technologies (BRET, FRET), and targeted protein degradation for therapeutics (PROTACs). The development of new fluorophores and fluorogenic dyes (such as the JANELIA FLUOR dyes) as chloroalkane conjugates serves as one example highlighting renewed interest in HALOTAG for fluorescence detection in cell imaging applications. The advantages of such dyes in brightness, photostability, sensitivity, and far-red spectral detection over conventional tools such as widely-used fluorescent proteins is particularly apparent in challenging or highly sensitive imaging applications in endogenous biology. As chloroalkane conjugates, they can take advantage of the self-labeling activity of HALOTAG to measure protein abundance and localization in a target-specific manner through genetic fusion. However, there is a lack of available tools capable of measuring important functional dynamics with cell imaging as well, such as protein interactions or changes in metabolite concentration, which can take advantage of these improvements in fluorescence detection. What is needed in the field are tools for controlling self-labeling activity in a dynamic way, in systems such as HALOTAG.

### SUMMARY

[0006] Provided herein are peptide and polypeptide sequences that structurally assemble to form active, modified dehalogenase structures capable of binding to a haloalkyl ligand. In particular, provided herein are split dehalogenase variants that assemble through structural complementation into active dehalogenase complexes, and systems and methods of use thereof.

[0007] In some embodiments, provided herein are compositions comprising split variants of a polypeptide comprising at least 70% sequence similarity (e.g., at least 70%, at least 75%, at least 80%, at least 85%, at least 90%, at least 95%) with SEQ ID NO: 1. In some embodiments, the split variant comprises at least 70% (e.g., at least 70%, at least 75%, at least 80%, at least 85%, at least 90%, at least 95%, 100%) sequence identity with SEQ ID NO: 1.

[0008] In some embodiments, a split variant is a binary system comprising first and second fragments. In some embodiments, the split variant comprises: (i) a first fragment of a polypeptide comprising at least 70% sequence similarity (e.g., at least 70%, at least 75%, at least 80%, at least 85%, at least 90%, at least 95%) with a first portion of SEQ ID NO: 1, and (ii) a second fragment of a polypeptide comprising at least 70% sequence similarity (e.g., at least 70%, at least 75%, at least 80%, at least 85%, at least 90%, at least 95%, 100%) with a second portion of SEQ ID NO: 1. In some embodiments, the first fragment comprises at least 70% (e.g., at least 70%, at least 75%, at least 80%, at least 85%, at least 90%, at least 95%, 100%) sequence identity with the first portion of SEQ ID NO: 1. In some embodiments, the second fragment comprises at least 70% (e.g., at least 70%, at least 75%, at least 80%, at least 85%, at least 90%, at least 95%, 100%) sequence identity with the second portion of SEQ ID NO: 1. In some embodiments, the first fragment and the second fragment collectively comprise amino acid sequence corresponding to at least 80% of the length of SEQ ID NO: 1 (e.g., at least 80%, at least 85%, at least 90%, at least 95%, 100%).

[0009] In some embodiments, the first and second fragments each comprise at least 70% (e.g., at least 70%, at least 75%, at least 80%, at least 85%, at least 90%, at least 95%, 100%) sequence identity with one of SEQ ID NOS: 2-577. In some embodiments, the first and second fragments each comprise at 100% sequence similarity with one of SEQ ID NOS: 2-577. In some embodiments, the first and second fragments each comprise at 100% sequence identity with one of SEQ ID NOS: 2-577.

[0010] In some embodiments, the first fragment comprises at least 70% (e.g., at least 70%, at least 75%, at least 80%, at least 85%, at least 90%, at least 95%, 100%) sequence similarity with one of SEQ ID NOS: 2, 4, 6, 8, 10, 12, 14, 16, 18, 20, 22, 24, 26, 28, 30, 32, 34, 36, 38, 40, 42, 44, 46, 48, 50, 52, 54, 56, 58, 60, 62, 64, 66, 68, 70, 72, 74, 76, 78, 80, 82, 84, 86, 88, 90, 92, 94, 96, 98, 100, 102, 104, 106, 108, 110, 112, 114, 116, 118, 120, 122, 124, 126, 128, 130, 132, 134, 136, 138, 140, 142, 144, 146, 148, 150, 152, 154, 156, 158, 160, 162, 164, 166, 168, 170, 172, 174, 176, 178, 180, 182, 184, 186, 188, 190, 192, 194, 196, 198, 200, 202, 204, 206, 208, 210, 212, 214, 216, 218, 220, 222, 224, 226, 228, 230, 232, 234, 236, 238, 240, 242, 244, 246, 248, 250, 252, 254, 256, 258, 260, 262, 264, 266, 268, 270, 272, 274, 276, 278, 280, 282, 284, 286, 288, 290, 292, 294, 296, 298, 300, 302, 304, 306, 308, 310, 312, 314, 316, 318, 320, 322, 324, 326, 328, 330, 332, 334, 336, 338, 340, 342, 344, 346, 348, 350, 352, 354, 356, 358, 360, 362, 364, 366, 368, 370, 372, 374, 376, 378, 380, 382, 384, 386, 388, 390, 392, 394, 396, 398, 400, 402, 404, 406, 408, 410, 412, 414, 416, 418, 420, 422, 424, 426, 428, 430, 432, 434, 436, 438, 440, 442, 444, 446, 448, 450, 452, 454, 456, 458, 460, 462, 464, 466, 468, 470, 472, 474, 476, 478, 480, 482, 484, 486, 488, 490, 492, 494, 496, 498, 500, 502, 504, 506, 508, 510, 512, 514, 516, 518, 520, 522, 524, 526, 528, 530, 532, 534, 536, 538, 540, 542, 544, 546, 548, 550, 552, 554, 556, 558, 560, 562, 564, 566, 568, 570, 572, 574, and 576; and the second fragment comprises at least 70% (e.g., at least 70%, at least 75%, at least 80%, at least 85%, at least 90%, at least 95%, 100%) sequence similarity with one of SEQ ID NOS: 1, 3, 5, 7, 9, 11, 13, 15, 17, 19, 21, 23, 25, 27, 29, 31, 33, 35, 37, 39, 41, 43, 45, 47, 49, 51, 53, 55, 57, 59, 61, 63, 65, 67, 69, 71, 73, 75, 77, 79, 81, 83, 85, 87, 89, 91, 93, 95, 97, 99, 101, 103, 105, 107, 109, 111, 113, 115, 117, 119, 121, 123, 125, 127, 129, 131, 133, 135, 137, 139, 141, 143, 145, 147, 149, 151, 153, 155, 157, 159, 161, 163, 165, 167, 169, 171, 173, 175, 177, 179, 181, 183, 185, 187, 189, 191, 193, 195, 197, 199, 201, 203, 205, 207, 209, 211, 213, 215, 217, 219, 221, 223, 225, 227, 229, 231, 233, 235, 237, 239, 241, 243, 245, 247, 249, 251, 253, 255, 257, 259, 261, 263, 265, 267, 269, 271, 273, 275, 277, 279, 281, 283, 285, 287, 289, 291, 293, 295, 297, 299, 301, 303, 305, 307, 309, 311, 313, 315, 317, 319, 321, 323, 325, 327, 329, 331, 333, 335, 337, 339, 341, 343, 345, 347, 349, 351, 353, 355, 357, 359, 361, 363, 365, 367, 369, 371, 373, 375, 377, 379, 381, 383, 385, 387, 389, 391, 393, 395, 397, 399, 401, 403, 405, 407, 409, 411, 413, 415, 417, 419, 421, 423, 425, 427, 429, 431, 433, 435, 437, 439, 441, 443, 445, 447, 449, 451, 453, 455, 457, 459, 461, 463, 465, 467, 469, 471, 473, 475, 477, 479, 481, 483, 485, 487, 489, 491, 493, 495, 497, 499, 501, 503, 505, 507, 509, 511, 513, 515, 517, 519, 521, 523, 525, 527, 529, 531, 533, 535, 537, 539, 541, 543, 545, 547, 549, 551, 553, 555, 557, 559, 561, 563, 565, 567, 569, 571, 573, 575, and 577.

[0011] In some embodiments, the first fragment comprises at least 70% (e.g., at least 70%, at least 75%, at least 80%, at least 85%, at least 90%, at least 95%, 100%) sequence identity with the first reference sequence selected from one of SEQ ID NOS: 2, 4, 6, 8, 10, 12, 14, 16, 18, 20, 22, 24, 26, 28, 30, 32, 34, 36, 38, 40, 42, 44, 46, 48, 50, 52, 54, 56, 58, 60, 62, 64, 66, 68, 70, 72, 74, 76, 78, 80, 82, 84, 86, 88, 90, 92, 94, 96, 98, 100, 102, 104, 106, 108, 110, 112, 114, 116, 118, 120, 122, 124, 126, 128, 130, 132, 134, 136, 138, 140, 142, 144, 146, 148, 150, 152, 154, 156, 158, 160, 162, 164, 166, 168, 170, 172, 174, 176, 178, 180, 182, 184, 186, 188, 190, 192, 194, 196, 198, 200, 202, 204, 206, 208, 210, 212, 214, 216, 218, 220, 222, 224, 226, 228, 230, 232, 234, 236, 238, 240, 242, 244, 246, 248, 250, 252, 254, 256, 258, 260, 262, 264, 266, 268, 270, 272, 274, 276, 278, 280, 282, 284, 286, 288, 290, 292, 294, 296, 298, 300, 302, 304, 306, 308, 310, 312, 314, 316, 318, 320, 322, 324, 326, 328, 330, 332, 334, 336, 338, 340, 342, 344, 346, 348, 350, 352, 354, 356, 358, 360, 362, 364, 366, 368, 370, 372, 374, 376, 378, 380, 382, 384, 386, 388, 390, 392, 394, 396, 398, 400, 402, 404, 406, 408, 410, 412, 414, 416, 418, 420, 422, 424, 426, 428, 430, 432, 434, 436, 438, 440, 442, 444, 446, 448, 450, 452, 454, 456, 458, 460, 462, 464, 466, 468, 470, 472, 474, 476, 478, 480, 482, 484, 486, 488, 490, 492, 494, 496, 498, 500, 502, 504, 506, 508, 510, 512, 514, 516, 518, 520, 522, 524, 526, 528, 530, 532, 534, 536, 538, 540, 542, 544, 546, 548, 550, 552, 554, 556, 558, 560, 562, 564, 566, 568, 570, 572, 574, and 576.

[0012] In some embodiments, the second fragment comprises at least 70% (e.g., at least 70%, at least 75%, at least 80%, at least 85%, at least 90%, at least 95%, 100%) sequence identity with the second reference sequence selected from one of SEQ ID NOS: 1, 3, 5, 7, 9, 11, 13, 15, 17, 19, 21, 23, 25, 27, 29, 31, 33, 35, 37, 39, 41, 43, 45, 47, 49, 51, 53, 55, 57, 59, 61, 63, 65, 67, 69, 71, 73, 75, 77, 79, 81, 83, 85, 87, 89, 91, 93, 95, 97, 99, 101, 103, 105, 107, 109, 111, 113, 115, 117, 119, 121, 123, 125, 127, 129, 131, 133, 135, 137, 139, 141, 143, 145, 147, 149, 151, 153, 155, 157, 159, 161, 163, 165, 167, 169, 171, 173, 175, 177, 179, 181, 183, 185, 187, 189, 191, 193, 195, 197, 199, 201, 203, 205, 207, 209, 211, 213, 215, 217, 219, 221, 223, 225, 227, 229, 231, 233, 235, 237, 239, 241, 243, 245, 247, 249, 251, 253, 255, 257, 259, 261, 263, 265, 267, 269, 271, 273, 275, 277, 279, 281, 283, 285, 287, 289, 291, 293, 295, 297, 299, 301, 303, 305, 307, 309, 311, 313, 315, 317, 319, 321, 323, 325, 327, 329, 331, 333, 335, 337, 339, 341, 343, 345, 347, 349, 351, 353, 355, 357, 359, 361, 363, 365, 367, 369, 371, 373, 375, 377, 379, 381, 383, 385, 387, 389, 391, 393, 395, 397, 399, 401, 403, 405, 407, 409, 411, 413, 415, 417, 419, 421, 423, 425, 427, 429, 431, 433, 435, 437, 439, 441, 443, 445, 447, 449, 451, 453, 455, 457, 459, 461, 463, 465, 467, 469, 471, 473, 475, 477, 479, 481, 483, 485, 487, 489, 491, 493, 495, 497, 499, 501, 503, 505, 507, 509, 511, 513, 515, 517, 519, 521, 523, 525, 527, 529, 531, 533, 535, 537, 539, 541, 543, 545, 547, 549, 551, 553, 555, 557, 559, 561, 563, 565, 567, 569, 571, 573, 575, and 577.

[0013] In some embodiments, the first and second fragments exhibit enhancement of one or more traits compared to the first and second reference sequences, wherein the traits are selected from: affinity for each other, expression, intracellular solubility, intracellular stability, and activity when combined.

[0014] In some embodiments, the split variant comprises a split (“sp”) site at a position corresponding to any position between positions 5 and 290 (e.g., positions 19-34). In some embodiments, the split variant comprises a sp site at a position corresponding to a position between positions 5 and 13 (e.g., 5, 6, 7, 8, 9, 10, 11, 12, 13, or ranges therebetween), 36 and 51 (e.g., 36, 37, 38, 39, 40, 41, 42, 43, 44, 45, 46, 47, 48, 49, 50, 51, or ranges therebetween), 63 and 72 (e.g., 63, 64, 65, 66, 67, 68, 69, 70, 71, 72, or ranges therebetween), 84 and 92 (e.g., 84, 85, 86, 87, 88, 89, 90, 91, 92, or ranges therebetween), 104 and 130 (e.g., 104, 105, 106, 107, 108, 109, 110, 111, 112, 113, 114, 115, 116, 117, 118, 119, 120, 121, 122, 123, 124, 125, 126, 127, 128, 129, 130, or ranges therebetween), 142 and 148 (e.g., 142, 143, 144, 145, 146, 147, 148, and ranges therebetween), 160 and 174 (e.g., 160, 161, 162, 163, 164, 165, 166, 167, 168, 169, 170, 171, 172, 173, 174, or ranges therebetween), 186 and 189 (e.g., 186, 187, 188, 189, or ranges therebetween), 201 and 203 (e.g., 201, 202, 203, or ranges therebetween), 221 and 229 (e.g., 221, 222, 223, 224, 225, 226, 227, 228, 229, or ranges therebetween), or 269 and 290 (e.g., 269, 270, 271, 272, 273, 274, 275, 276, 277, 278, 279, 280, 281, 282, 283, 284, 285, 286, 287, 288, 289, or 290 or ranges therebetween) of SEQ ID NO: 1.

[0015] In some embodiments, the split variant is capable of forming a covalent bond with a haloalkane substrate.

[0016] In some embodiments, the split variant comprises 100% sequence identity to SEQ ID NO: 1.

[0017] In some embodiments, the split variant comprises deletions of up to 40 amino acids (e.g., 1, 2, 3, 4, 5, 6, 7, 8, 9, 10, 11, 12, 13, 14, 15, 16, 17, 18, 19, 20, 25, 30, 35, 40, or ranges therebetween) at positions corresponding to one or more of the N-terminus of SEQ ID NO: 1, the C-terminus of SEQ ID NO: 1, and either side of the sp site. In some embodiments, the split variant comprises duplicated sequences of up to 40 amino acids (e.g., 1, 2, 3, 4, 5, 6, 7, 8, 9, 10, 11, 12, 13, 14, 15, 16, 17, 18, 19, 20, 25, 30, 35, 40, or ranges therebetween) at positions corresponding to either side of the sp site.

[0018] In some embodiments, provided herein are compositions comprising (i) a peptide having at least 70% (e.g., 70%, 75%, 80%, 85%, 90%, 95%, 100%) sequence similarity with one or more of SEQ ID NOS: 578-1187, and (ii) a polypeptide having at least 70% sequence similarity with one or more of SEQ ID NOS: 1188-3033; wherein a complex of the peptide and polypeptide is capable of forming a covalent bond with a haloalkane substrate. In some embodiments, the peptide has at least 70% (e.g., 70%, 75%, 80%, 85%, 90%, 95%, 100%) sequence identity with one of SEQ ID NOS: 578-1187. In some embodiments, the peptide has at least 70% (e.g., 70%, 75%, 80%, 85%, 90%, 95%, 100%) sequence identity with one of SEQ ID NOS: 1188-3033.

[0019] In some embodiments, provided herein are peptides having at least 70% (e.g., 70%, 75%, 80%, 85%, 90%, 95%, 100%) sequence similarity with one or more of SEQ ID NOS: 578-1187. In some embodiments, provided herein are peptides having at least 70% (e.g., 70%, 75%, 80%, 85%, 90%, 95%, 100%) sequence identity with one of SEQ ID NOS: 578-1187. In some embodiments, the peptides are capable of forming a complex (e.g., facilitated or unfacilitated) with a polypeptide of SEQ ID NO: 1188, wherein the complex is capable of forming a covalent bond with a haloalkane substrate.

[0020] In some embodiments, provided herein are peptides or polypeptides comprising at least 70% (e.g., at least 70%, at least 75%, at least 80%, at least 85%, at least 90%, at least 95%, 100%) sequence similarity with one of SEQ ID NOS: 2, 4, 6, 8, 10, 12, 14, 16, 18, 20, 22, 24, 26, 28, 30, 32, 34, 36, 38, 40, 42, 44, 46, 48, 50, 52, 54, 56, 58, 60, 62, 64, 66, 68, 70, 72, 74, 76, 78, 80, 82, 84, 86, 88, 90, 92, 94, 96, 98, 100, 102, 104, 106, 108, 110, 112, 114, 116, 118, 120, 122, 124, 126, 128, 130, 132, 134, 136, 138, 140, 142, 144, 146, 148, 150, 152, 154, 156, 158, 160, 162, 164, 166, 168, 170, 172, 174, 176, 178, 180, 182, 184, 186, 188, 190, 192, 194, 196, 198, 200, 202, 204, 206, 208, 210, 212, 214, 216, 218, 220, 222, 224, 226, 228, 230, 232, 234, 236, 238, 240, 242, 244, 246, 248, 250, 252, 254, 256, 258, 260, 262, 264, 266, 268, 270, 272, 274, 276, 278, 280, 282, 284, 286, 288, 290, 292, 294, 296, 298, 300, 302, 304, 306, 308, 310, 312, 314, 316, 318, 320, 322, 324, 326, 328, 330, 332, 334, 336, 338, 340, 342, 344, 346, 348, 350, 352, 354, 356, 358, 360, 362, 364, 366, 368, 370, 372, 374, 376, 378, 380, 382, 384, 386, 388, 390, 392, 394, 396, 398, 400, 402, 404, 406, 408, 410, 412, 414, 416, 418, 420, 422, 424, 426, 428, 430, 432, 434, 436, 438, 440, 442, 444, 446, 448, 450, 452, 454, 456, 458, 460, 462, 464, 466, 468, 470, 472, 474, 476, 478, 480, 482, 484, 486, 488, 490, 492, 494, 496, 498, 500, 502, 504, 506, 508, 510, 512, 514, 516, 518, 520, 522, 524, 526, 528, 530, 532, 534, 536, 538, 540, 542, 544, 546, 548, 550, 552, 554, 556, 558, 560, 562, 564, 566, 568, 570, 572, 574, and 576; wherein the peptide or polypeptide is capable of interacting with a peptide or polypeptide selected from one of SEQ ID NOS: 1, 3, 5, 7, 9, 11, 13, 15, 17, 19, 21, 23, 25, 27, 29, 31, 33, 35, 37, 39, 41, 43, 45, 47, 49, 51, 53, 55, 57, 59, 61, 63, 65, 67, 69, 71, 73, 75, 77, 79, 81, 83, 85, 87, 89, 91, 93, 95, 97, 99, 101, 103, 105, 107, 109, 111, 113, 115, 117, 119, 121, 123, 125, 127, 129, 131, 133, 135, 137, 139, 141, 143, 145, 147, 149, 151, 153, 155, 157, 159, 161, 163, 165, 167, 169, 171, 173, 175, 177, 179, 181, 183, 185, 187, 189, 191, 193, 195, 197, 199, 201, 203, 205, 207, 209, 211, 213, 215, 217, 219, 221, 223, 225, 227, 229, 231, 233, 235, 237, 239, 241, 243, 245, 247, 249, 251, 253, 255, 257, 259, 261, 263, 265, 267, 269, 271, 273, 275, 277, 279, 281, 283, 285, 287, 289, 291, 293, 295, 297, 299, 301, 303, 305, 307, 309, 311, 313, 315, 317, 319, 321, 323, 325, 327, 329, 331, 333, 335, 337, 339, 341, 343, 345, 347, 349, 351, 353, 355, 357, 359, 361, 363, 365, 367, 369, 371, 373, 375, 377, 379, 381, 383, 385, 387, 389, 391, 393, 395, 397, 399, 401, 403, 405, 407, 409, 411, 413, 415, 417, 419, 421, 423, 425, 427, 429, 431, 433, 435, 437, 439, 441, 443, 445, 447, 449, 451, 453, 455, 457, 459, 461, 463, 465, 467, 469, 471, 473, 475, 477, 479, 481, 483, 485, 487, 489, 491, 493, 495, 497, 499, 501, 503, 505, 507, 509, 511, 513, 515, 517, 519, 521, 523, 525, 527, 529, 531, 533, 535, 537, 539, 541, 543, 545, 547, 549, 551, 553, 555, 557, 559, 561, 563, 565, 567, 569, 571, 573, 575, and 577 to form a modified dehalogenase complex, and wherein the is capable of forming a covalent bond with a haloalkane substrate. In some embodiments, the peptide or polypeptide comprises at least 70% (e.g., at least 70%, at least 75%, at least 80%, at least 85%, at least 90%, at least 95%, 100%) sequence identity with one of SEQ ID NOS: 2, 4, 6, 8, 10, 12, 14, 16, 18, 20, 22, 24, 26, 28, 30, 32, 34, 36, 38, 40, 42, 44, 46, 48, 50, 52, 54, 56, 58, 60, 62, 64, 66, 68, 70, 72, 74, 76, 78, 80, 82, 84, 86, 88, 90, 92, 94, 96, 98, 100, 102, 104, 106, 108, 110, 112, 114, 116, 118, 120, 122, 124, 126, 128, 130, 132, 134, 136, 138, 140, 142, 144, 146, 148, 150, 152, 154, 156, 158, 160, 162, 164, 166, 168, 170, 172, 174, 176, 178, 180, 182, 184, 186, 188, 190, 192, 194, 196, 198, 200, 202, 204, 206, 208, 210, 212, 214, 216, 218, 220, 222, 224, 226, 228, 230, 232, 234, 236, 238, 240, 242, 244, 246, 248, 250, 252, 254, 256, 258, 260, 262, 264, 266, 268, 270, 272, 274, 276, 278, 280, 282, 284, 286, 288, 290, 292, 294, 296, 298, 300, 302, 304, 306, 308, 310, 312, 314, 316, 318, 320, 322, 324, 326, 328, 330, 332, 334, 336, 338, 340, 342, 344, 346, 348, 350, 352, 354, 356, 358, 360, 362, 364, 366, 368, 370, 372, 374, 376, 378, 380, 382, 384, 386, 388, 390, 392, 394, 396, 398, 400, 402, 404, 406, 408, 410, 412, 414, 416, 418, 420, 422, 424, 426, 428, 430, 432, 434, 436, 438, 440, 442, 444, 446, 448, 450, 452, 454, 456, 458, 460, 462, 464, 466, 468, 470, 472, 474, 476, 478, 480, 482, 484, 486, 488, 490, 492, 494, 496, 498, 500, 502, 504, 506, 508, 510, 512, 514, 516, 518, 520, 522, 524, 526, 528, 530, 532, 534, 536, 538, 540, 542, 544, 546, 548, 550, 552, 554, 556, 558, 560, 562, 564, 566, 568, 570, 572, 574, and 576.

[0021] In some embodiments, provided herein are peptides or polypeptides comprising at least 70% (e.g., at least 70%, at least 75%, at least 80%, at least 85%, at least 90%, at least 95%, 100%) sequence similarity with one of SEQ ID NOS: 1, 3, 5, 7, 9, 11, 13, 15, 17, 19, 21, 23, 25, 27, 29, 31, 33, 35, 37, 39, 41, 43, 45, 47, 49, 51, 53, 55, 57, 59, 61, 63, 65, 67, 69, 71, 73, 75, 77, 79, 81, 83, 85, 87, 89, 91, 93, 95, 97, 99, 101, 103, 105, 107, 109, 111, 113, 115, 117, 119, 121, 123, 125, 127, 129, 131, 133, 135, 137, 139, 141, 143, 145, 147, 149, 151, 153, 155, 157, 159, 161, 163, 165, 167, 169, 171, 173, 175, 177, 179, 181, 183, 185, 187, 189, 191, 193, 195, 197, 199, 201, 203, 205, 207, 209, 211, 213, 215, 217, 219, 221, 223, 225, 227, 229, 231, 233, 235, 237, 239, 241, 243, 245, 247, 249, 251, 253, 255, 257, 259, 261, 263, 265, 267, 269, 271, 273, 275, 277, 279, 281, 283, 285, 287, 289, 291, 293, 295, 297, 299, 301, 303, 305, 307, 309, 311, 313, 315, 317, 319, 321, 323, 325, 327, 329, 331, 333, 335, 337, 339, 341, 343, 345, 347, 349, 351, 353, 355, 357, 359, 361, 363, 365, 367, 369, 371, 373, 375, 377, 379, 381, 383, 385, 387, 389, 391, 393, 395, 397, 399, 401, 403, 405, 407, 409, 411, 413, 415, 417, 419, 421, 423, 425, 427, 429, 431, 433, 435, 437, 439, 441, 443, 445, 447, 449, 451, 453, 455, 457, 459, 461, 463, 465, 467, 469, 471, 473, 475, 477, 479, 481, 483, 485, 487, 489, 491, 493, 495, 497, 499, 501, 503, 505, 507, 509, 511, 513, 515, 517, 519, 521, 523, 525, 527, 529, 531, 533, 535, 537, 539, 541, 543, 545, 547, 549, 551, 553, 555, 557, 559, 561, 563, 565, 567, 569, 571, 573, 575, and 577; wherein the peptide or polypeptide is capable of interacting with a peptide or polypeptide selected from one of SEQ ID NOS: 2, 4, 6, 8, 10, 12, 14, 16, 18, 20, 22, 24, 26, 28, 30, 32, 34, 36, 38, 40, 42, 44, 46, 48, 50, 52, 54, 56, 58, 60, 62, 64, 66, 68, 70, 72, 74, 76, 78, 80, 82, 84, 86, 88, 90, 92, 94, 96, 98, 100, 102, 104, 106, 108, 110, 112, 114, 116, 118, 120, 122, 124, 126, 128, 130, 132, 134, 136, 138, 140, 142, 144, 146, 148, 150, 152, 154, 156, 158, 160, 162, 164, 166, 168, 170, 172, 174, 176, 178, 180, 182, 184, 186, 188, 190, 192, 194, 196, 198, 200, 202, 204, 206, 208, 210, 212, 214, 216, 218, 220, 222, 224, 226, 228, 230, 232, 234, 236, 238, 240, 242, 244, 246, 248, 250, 252, 254, 256, 258, 260, 262, 264, 266, 268, 270, 272, 274, 276, 278, 280, 282, 284, 286, 288, 290, 292, 294, 296, 298, 300, 302, 304, 306, 308, 310, 312, 314, 316, 318, 320, 322, 324, 326, 328, 330, 332, 334, 336, 338, 340, 342, 344, 346, 348, 350, 352, 354, 356, 358, 360, 362, 364, 366, 368, 370, 372, 374, 376, 378, 380, 382, 384, 386, 388, 390, 392, 394, 396, 398, 400, 402, 404, 406, 408, 410, 412, 414, 416, 418, 420, 422, 424, 426, 428, 430, 432, 434, 436, 438, 440, 442, 444, 446, 448, 450, 452, 454, 456, 458, 460, 462, 464, 466, 468, 470, 472, 474, 476, 478, 480, 482, 484, 486, 488, 490, 492, 494, 496, 498, 500, 502, 504, 506, 508, 510, 512, 514, 516, 518, 520, 522, 524, 526, 528, 530, 532, 534, 536, 538, 540, 542, 544, 546, 548, 550, 552, 554, 556, 558, 560, 562, 564, 566, 568, 570, 572, 574, and 576 to form a modified dehalogenase complex, and wherein the modified dehalogenase complex is capable of forming a covalent bond with a haloalkane substrate. In some embodiments, the peptide or polypeptide comprises at least 70% (e.g., at least 70%, at least 75%, at least 80%, at least 85%, at least 90%, at least 95%, 100%) sequence identity with one of SEQ ID NOS: 1, 3, 5, 7, 9, 11, 13, 15, 17, 19, 21, 23, 25, 27, 29, 31, 33, 35, 37, 39, 41, 43, 45, 47, 49, 51, 53, 55, 57, 59, 61, 63, 65, 67, 69, 71, 73, 75, 77, 79, 81, 83, 85, 87, 89, 91, 93, 95, 97, 99, 101, 103, 105, 107, 109, 111, 113, 115, 117, 119, 121, 123, 125, 127, 129, 131, 133, 135, 137, 139, 141, 143, 145, 147, 149, 151, 153, 155, 157, 159, 161, 163, 165, 167, 169, 171, 173, 175, 177, 179, 181, 183, 185, 187, 189, 191, 193, 195, 197, 199, 201, 203, 205, 207, 209, 211, 213, 215, 217, 219, 221, 223, 225, 227, 229, 231, 233, 235, 237, 239, 241, 243, 245, 247, 249, 251, 253, 255, 257, 259, 261, 263, 265, 267, 269, 271, 273, 275, 277, 279, 281, 283, 285, 287, 289, 291, 293, 295, 297, 299, 301, 303, 305, 307, 309, 311, 313, 315, 317, 319, 321, 323, 325, 327, 329, 331, 333, 335, 337, 339, 341, 343, 345, 347, 349, 351, 353, 355, 357, 359, 361, 363, 365, 367, 369, 371, 373, 375, 377, 379, 381, 383, 385, 387, 389, 391, 393, 395, 397, 399, 401, 403, 405, 407, 409, 411, 413, 415, 417, 419, 421, 423, 425, 427, 429, 431, 433, 435, 437, 439, 441, 443, 445, 447, 449, 451, 453, 455, 457, 459, 461, 463, 465, 467, 469, 471, 473, 475, 477, 479, 481, 483, 485, 487, 489, 491, 493, 495, 497, 499, 501, 503, 505, 507, 509, 511, 513, 515, 517, 519, 521, 523, 525, 527, 529, 531, 533, 535, 537, 539, 541, 543, 545, 547, 549, 551, 553, 555, 557, 559, 561, 563, 565, 567, 569, 571, 573, 575, and 577.

[0022] In some embodiments, provided herein are peptides comprising at least 70% (e.g., at least 70%, at least 75%, at least 80%, at least 85%, at least 90%, at least 95%, 100%) sequence similarity to one of SEQ ID NOS: 578-1187; wherein the peptide is capable of interacting with a polypeptide selected from one of SEQ ID NOS: 1188-3033 to form a modified dehalogenase complex, and wherein the modified dehalogenase complex is capable of forming a covalent bond with a haloalkane substrate. In some embodiments, the peptides comprise at least 70% (e.g., at least 70%, at least 75%, at least 80%, at least 85%, at least 90%, at least 95%, 100%) sequence identity to one of SEQ ID NOS: 578-1187.

[0023] In some embodiments, provided herein are peptides comprising 100% sequence identity with SEQ ID NO: 3034 or 3035.

[0024] In some embodiments, provided herein are polypeptides comprising at least 70% (e.g., at least 70%, at least 75%, at least 80%, at least 85%, at least 90%, at least 95%, 100%) sequence similarity to one of SEQ ID NOS: 1188-3033; wherein the polypeptide is capable of interacting with a peptide selected from one of SEQ ID NOS: 578-1187, 3034, or 3035) to form a modified dehalogenase complex, and wherein the modified dehalogenase complex is capable of forming a covalent bond with a haloalkane substrate. In some embodiments, the polypeptide comprises at least 70% (e.g., at least 70%, at least 75%, at least 80%, at least 85%, at least 90%, at least 95%, 100%) sequence identity to one of SEQ ID NOS: 1188-3033.

[0025] In some embodiments, a first fragment, peptide, or polypeptide component of the sp modified dehalogenase herein is present as a fusion protein with a first peptide, polypeptide, or protein of interest. In some embodiments, the first peptide, polypeptide, or protein of interest is selected from the group consisting of an antibody, antibody fragment, protein A, an Ig binding domain of protein A, protein G, an Ig binding domain of protein G, protein A/G, an Ig binding domain of protein A/G, protein L, a Ig binding domain of protein L, protein M, an Ig binding domain of protein M, oligonucleotide probe, peptide nucleic acid, DARPin, anticalin, nanobody, aptamer, affimer, a purified protein, and analyte binding domain(s) of proteins. In some embodiments, the second fragment, peptide, or polypeptide component of the sp modified dehalogenase herein is present as a fusion protein with a second peptide, polypeptide, or protein of interest. In some embodiments, the second peptide, polypeptide, or protein of interest is selected from the group consisting of an antibody, antibody fragment, protein A, an Ig binding domain of protein A, protein G, an Ig binding domain of protein G, protein A/G, an Ig binding domain of protein A/G, protein L, a Ig binding domain of protein L, protein M, an Ig binding domain of protein M, oligonucleotide probe, peptide nucleic acid, DARPin, anticalin, nanobody, aptamer, affimer, a purified protein, and analyte binding domain(s) of proteins. In some embodiments, the first and second peptides, polypeptides, or proteins of interest are interaction elements capable of forming a complex with each other. In some embodiments, the first and second peptides, polypeptides, or proteins of interest are co-localization elements configured to co-localize within a cellular compartment, a cell, a tissue, or an organism. In some embodiments, the second fragment is tethered to a molecule of interest.

[0026] In some embodiments, the first and second fragment, peptide, or polypeptide component of a sp modified dehalogenase are fused to antibodies or other binding proteins in order for their proximity to be facilitated by the presence of analyte for the antibodies or other binding proteins (e.g., in a diagnostic assay).

[0027] In some embodiments, the first fragment, peptide, or polypeptide component of the sp modified dehalogenase herein and/or the second fragment, peptide, or polypeptide component of the sp modified dehalogenase herein is tethered (directly or via a linker) to a small molecule. In some embodiments, a small molecule tethered to the fragment is capable of interacting (e.g., binding) to a small molecule or other element (e.g., peptide or polypeptide (see above) tethered or fused to the other fragment.

[0028] In some embodiments, each fragment of a dehalogenase is tethered (e.g., fused, linked, etc.) to complementary interaction or dimerization elements. In some embodiments, the interaction or dimerization elements facilitate formation of the active dehalogenase complex. For example, a first fragment of dehalogenase is tethered to FRB and a second fragment of dehalogenase is tethered to FKBP. In such an embodiments, the presence of rapamycin induces dimerization of FRB and FKBP and facilitates formation of the dehalogenase complex. In some embodiments, a sp dehalogenase is used in such a system that is not capable of independent active complex formation, but does form an active complex upon facilitation.

[0029] In some embodiments, provided herein is a polynucleotide or polynucleotides encoding the split variants described herein. In some embodiments, provided herein is an expression vector or expression vectors comprising the polynucleotide or polynucleotides described herein. In some embodiments, provided herein are host cells comprising the polynucleotide or polynucleotides or the expression vector or expression vectors described herein. In some embodiments, cells are provided in which the genome has been edited to incorporate sequences encoding the split variants described herein.

[0030] A split dehalogenase complementation system offers several technical advantages over intact or circularly permuted dehalogenases. While the covalent labeling of intact dehalogenase with chloroalkane ligands can allow direct readouts of the location and concentration of a protein, a split dehalogenase directs such labeling to sites of molecular interactions (e.g., protein-protein interactions). Many critical cellular functions, including signal transduction, transcription, translation, and cargo trafficking require specific interactions between proteins, membranes, organelles, and subcellular structures. A split dehalogenase system reports on the location, timing, and frequency of these events, whereas intact dehalogenase can only report on the presence of the molecules.

[0031] In some embodiments, the split dehalogenases systems, compositions, and methods herein find use in fluorescence microscopy and/or imaging applications. For example, split modified dehalogenases allow for monitoring of functional/molecular events (e.g., protein:protein interactions) with the fluorescent ligands beyond cell culture, for example, in live animals, tissues, organoid model systems, etc. split dehalogenases find use in measuring the localization and occurrence of molecular events within subcellular structures, at cell:cell interactions or interfaces, and in deep tissues of live organisms. These uses can further be configured into high-throughput formats for screening or diagnostic applications.

[0032] The components of a split dehalogenase individually present reduced activity compared to the active complex assembled therefrom. In some embodiments, assembly of the active complex occurs with the aid of interacting partner proteins fused to each fragment. Bimolecular fluorescence complementation (BiFC) of the green fluorescent protein (GFP) and other FPs has been used by researchers for years, but these BiFC systems have several crucial shortcomings. The fluorophores take time to mature, and the proteins tend to assemble irreversibly and suffer from poor performance in hypoxic conditions. In contrast, experiments conducted during development of embodiments herein demonstrate that some split dehalogenases assemble reversibly, and when coupled with fluorescently-tagged ligands, employ an exogenously-supplied, cell-permeable fluorescent ligand that requires no maturation or oxygen. In some embodiments, provided herein are chloroalkane ligands featuring bright, stable fluorophores that outperform protein-based fluorophores in terms of signal strength (e.g., quantum yield and extinction coefficient) and temporal-spatial resolution (e.g., image resolution), making them ideal for advanced imaging applications such as super-resolution microscopy and light sheet microscopy.

[0033] In contrast to other enzymatic complementation-based reporter systems, such as split luciferase, split dehalogenase forms a permanent covalent link with the substrate, creating a durable event mark that can be observed for hours, days, or longer. Although the link with the ligand cannot form in the absence of complementation of the split dehalogenase fragments, the covalent link remains even after the dehalogenase complex disassembles. Moreover, multiple complementation events can lead to signal accumulation that does not diminish as the substrate is depleted. This is in contrast with split luciferase, whose signal diminishes over time.

[0034] The utility of split dehalogenase extends beyond fluorescence imaging. Dehalogenase can accept a wide variety of ligands, provided the ligands harbor a haloalkane functional group. The ligand's cargo may include, but is not limited to, a fluorophore, a chromophore, an analyte-sensing complex, an affinity tag (such as biotin), a signal for protein degradation or post-translational modification, a nucleic acid, a peptide, a polypeptide, a chemical inducer of dimerization, or a solid support. As such, in certain embodiments, a split dehalogenase utilizes a cellular event as the initiation signal for color development, activation of a sensor, affinity tagging, proteolysis, DNA/RNA barcoding, crosslinking, dimerization, or assembly onto a support or molecular scaffold. The ultimate functional output of the split dehalogenase is determined by the choice of ligand supplied by the user. The flexibility of the split dehalogenase systems described herein find use in a variety of methods and applications.

[0035] In some embodiments, due to the utilities of certain split modified dehalogenases with fluorescence and for the detection of protein:protein interactions, embodiments herein find use in a variety of cell sorting applications. For example:
[0036] Sorting for presence of the complemented LgHT:SmHT or “dual” tag (SmHT-HiBiT) during CRISPR cell line generation. This helps solve the problem of how to isolate clonal cell lines that have been edited with the tag without “blind” sorting, which adds significant labor and time to isolating cell lines with a tag. With a sortable tag that enables fluorescent detection, a user can immediately sort edited cells for those with the edit.
[0037] Sorting for cells that contain the complemented spHaloTag when expressed from plasmids, typically fused to other proteins.
[0038] Sorting cells for those containing (or not containing) a specific PPI. This provides for enrichment for cells containing the interacting proteins in order to enable downstream assays, diagnostics, or purification of cells (such as modified T-cells).
[0039] Sorting for cells that have undergone a facilitated molecular interaction or molecular proximity, through a stimulus such as a small molecule or hormone. A specific example is sorting for cells that have formed ternary complexes via treatment with PROTACs, molecular glues, or other “TACs”. Other examples are sorting cells for molecular interactions through BRET and sorting cells that have a difference in fluorescence signal due to target engagement (e.g., for drug screening) that is being detected by the split HaloTag.
[0040] Sorting of cells that have been infected by a virus through the viral delivery of a nucleic acid sequence encoding the split HaloTag fragments into the cell or more directly if the viral proteins infecting the cells are themselves comprised of fusions to the spHaloTag components (such as a viral coat protein).
[0041] Methods that combine cell imaging and flow cytometry or sorting to simultaneously measure morphological cell characteristics and reporter or dye localization to evaluate cell populations (e.g., diagnostics), identify or isolate rare or difficult to culture cell types, or complex phenotyping. The use of a split dehalogenase with these methods enables, for example, cell cycle analysis, apoptosis detection, immunophenotyping, detection and quantification of intracellular signaling, drug screening, microbial population analysis, and stem cell analysis, among others.

[0042] In some embodiments, provided herein are methods to detect a protein-protein interaction in a sample comprising contacting: (a) a first fusion comprising: (i) a first complementary fragment of a split variant of a polypeptide comprising at least 70% (e.g., at least 70%, at least 75%, at least 80%, at least 85%, at least 90%, at least 95%, 100%) sequence similarity with a first portion of SEQ ID NO: 1; and (ii) a first protein of interest; (b) a second fusion comprising: (i) a second complementary fragment of a split variant of a polypeptide comprising at least 70% (e.g., at least 70%, at least 75%, at least 80%, at least 85%, at least 90%, at least 95%, 100%) sequence similarity with a second portion of SEQ ID NO: 1; and (ii) a second protein of interest; and (c) a substrate comprising R-linker-A-X, wherein R is a functional group or solid support, X is a halogen, and A-X is a substrate for a dehalogenase enzyme; wherein binding of the first protein of interest to the second protein of interest results in formation of a complex between the first complementary fragment and the secondary complementary fragment that is capable for forming a covalent bond with the substrate.

[0043] In certain embodiments, provided herein are methods to detect an interaction between two proteins in a sample. Methods herein include providing a sample having a cell comprising fusions of first and second heterologous protein sequences and first and second complementary fragments of a split dehalogenase or expression vector(s) of the invention (e.g., encoding complementary fragments of a split dehalogenase), a lysate thereof, or an in vitro transcription/translation reaction comprising such components; and a hydrolase substrate (e.g., haloalkane) with at least one functional group under conditions effective to allow for association of the first and second fusion proteins. The presence, amount, or location of at least one functional group in the sample is detected.

[0044] In some embodiments, provided herein are methods to detect an interaction between two proteins in a sample, comprising: (a) expressing within the sample a first fusion comprising: (i) a first complementary fragment of a split variant of a polypeptide comprising at least 70% (e.g., at least 70%, at least 75%, at least 80%, at least 85%, at least 90%, at least 95%, 100%) sequence similarity with a portion of SEQ ID NO: 1; and (ii) a first protein of interest; (b) expressing within the sample a second fusion comprising: (i) a second complementary fragment of a split variant of a polypeptide comprising at least 70% (e.g., at least 70%, at least 75%, at least 80%, at least 85%, at least 90%, at least 95%, 100%) sequence similarity with a portion of SEQ ID NO: 1; and (ii) a second protein of interest; (c) contacting the sample with a substrate comprising R-linker-A-X, wherein R is a functional group or solid support, X is a halogen, and A-X is a substrate for a dehalogenase enzyme; and (d) detecting the presence, amount and/or location of the at least one functional group.

[0045] In another embodiment, provided herein are methods to detect a molecule of interest in a sample. The methods include providing a sample comprising a cell comprising the molecule of interest bound to a first complementary fragment of a split dehalogenase and a fusion of a second complementary fragment of a split dehalogenase and a heterologous protein (or expression vector encoding the fusion), a lysate thereof, or an in vitro transcription/translation reaction comprising such components; and a hydrolase substrate (e.g., haloalkane) with at least one functional group under conditions effective to allow the heterologous protein to interact with the molecule of interest in the sample. The presence, amount, or location of at least one functional group in the sample is detected, thereby detecting the presence, amount, or location of the molecule of interest.

[0046] In some embodiments, provided herein are methods to detect a molecule of interest in a sample, comprising: (a) contacting the sample with a first complementary fragment of a split variant of a polypeptide comprising at least 70% (e.g., at least 70%, at least 75%, at least 80%, at least 85%, at least 90%, at least 95%, 100%) sequence similarity with a portion of SEQ ID NO: 1 tethered to the molecule of interest; and (b) expressing within the sample or contacting the sample with a fusion comprising: (i) a second complementary fragment of a split variant of a polypeptide comprising at least 70% (e.g., at least 70%, at least 75%, at least 80%, at least 85%, at least 90%, at least 95%, 100%) sequence similarity with a portion of SEQ ID NO: 1; and (ii) a protein capable of binding to the molecule of interest; (c) contacting the sample with a substrate comprising R-linker-A-X, wherein R is a functional group or solid support, X is a halogen, and A-X is a substrate for a dehalogenase enzyme; and (d) detecting the presence, amount and/or location of the at least one functional group.

[0047] In some embodiments, provided herein are methods to detect the effect of an agent on the interaction of two proteins, the method comprising: (a) expressing within the sample or contacting the sample with a first fusion comprising: (i) a first complementary fragment of a split variant of a polypeptide comprising at least 70% (e.g., at least 70%, at least 75%, at least 80%, at least 85%, at least 90%, at least 95%, 100%) sequence similarity with a portion of SEQ ID NO: 1; and (ii) a first protein sequence; (b) expressing within the sample or contacting the sample with a fusion comprising: (i) a second complementary fragment of a split variant of a polypeptide comprising at least 70% (e.g., at least 70%, at least 75%, at least 80%, at least 85%, at least 90%, at least 95%, 100%) sequence similarity with a portion of SEQ ID NO: 1; and (ii) a second protein sequence capable of binding to the first protein sequence; (c) contacting the sample with a substrate comprising R-linker-A-X, wherein R is a functional group or solid support, X is a halogen, and A-X is a substrate for a dehalogenase enzyme; and (d) contacting the sample with the agent; (e) detecting the presence, amount and/or location of the at least one functional group.

[0048] In some embodiments, provided herein are methods to detect the effect of an agent on the interaction of a protein of interest and a ligand of the protein, the method comprising: (a) expressing within the sample or contacting the sample with a fusion comprising: (i) a first complementary fragment of a split variant of a polypeptide comprising at least 70% (e.g., at least 70%, at least 75%, at least 80%, at least 85%, at least 90%, at least 95%, 100%) sequence similarity with a portion of SEQ ID NO: 1; and (ii) the protein of interest; (b) contacting the sample with a second complementary fragment of a split variant of a polypeptide comprising at least 70% (e.g., at least 70%, at least 75%, at least 80%, at least 85%, at least 90%, at least 95%, 100%) sequence similarity with a portion of SEQ ID NO: 1 tethered to the ligand; (c) contacting the sample with a substrate comprising R-linker-A-X, wherein R is a functional group or solid support, X is a halogen, and A-X is a substrate for a dehalogenase enzyme; and (d) contacting the sample with the agent; (e) detecting the presence, amount and/or location of the at least one functional group.

[0049] In some embodiments, provided herein are methods of controllable target protein degradation comprising: (a) providing or expressing in a sample a first fusion comprising: (i) a first complementary fragment of a split variant of a polypeptide comprising at least 70% (e.g., at least 70%, at least 75%, at least 80%, at least 85%, at least 90%, at least 95%, 100%) sequence similarity with a portion of SEQ ID NO: 1; and (ii) the target protein; (b) contacting the sample with a proteolysis targeting chimera (PROTAC) of a haloalkane and a ligand capable of engaging an E3 ubiquitin ligase; (c) contacting the sample with a second complementary fragment of the split variant of a polypeptide comprising at least 70% (e.g., at least 70%, at least 75%, at least 80%, at least 85%, at least 90%, at least 95%, 100%) sequence similarity with a portion of SEQ ID NO: 1, wherein formation of the split variant complex results in binding of the haloalkane by the split variant complex, bringing the ligand capable of engaging an E3 ubiquitin ligase in proximity of the target protein, ubiquitination of the target protein, and directing the target protein for proteasome degradation. In some embodiments, the first fusion further comprises a luciferase or a first component of a bioluminescent complex and one of the complementary fragments is tethered to a fluorophore, wherein light emission from the luciferase or the bioluminescent complex is capable of exciting the fluorophore.

[0050] In some embodiments, provided herein are methods of controllable target protein modification comprising: (a) providing or expressing in a sample a first fusion comprising: (i) a first complementary fragment of a split variant of a polypeptide comprising at least 70% (e.g., at least 70%, at least 75%, at least 80%, at least 85%, at least 90%, at least 95%, 100%) sequence similarity with a portion of SEQ ID NO: 1; and (ii) the target protein; (b) contacting the sample with a chimera of a haloalkane and a ligand capable of engaging a protein-modifying enzyme; (c) contacting the sample with a second complementary fragment of the split variant of a polypeptide comprising at least 70% (e.g., at least 70%, at least 75%, at least 80%, at least 85%, at least 90%, at least 95%, 100%) sequence similarity with a portion of SEQ ID NO: 1, wherein formation of the split variant complex results in binding of the haloalkane by the split variant complex, bringing the ligand capable of engaging the protein-modifying enzyme in proximity of the target protein, and modification of the target protein. In some embodiments, the chimera is a PhosTAC, and the protein-modifying enzyme is a phosphatase.

[0051] In some embodiments of any of the methods herein, the first complementary fragment comprises at least 70% (e.g., at least 70%, at least 75%, at least 80%, at least 85%, at least 90%, at least 95%, 100%) sequence identity with the first portion of SEQ ID NO: 1 and the second complementary fragment comprises at least 70% (e.g., at least 70%, at least 75%, at least 80%, at least 85%, at least 90%, at least 95%, 100%) sequence identity with the second portion of SEQ ID NO: 1.

[0052] In some embodiments of any of the methods herein, the first portion of SEQ ID NO: 1 is selected from SEQ ID NOS: 2, 4, 6, 8, 10, 12, 14, 16, 18, 20, 22, 24, 26, 28, 30, 32, 34, 36, 38, 40, 42, 44, 46, 48, 50, 52, 54, 56, 58, 60, 62, 64, 66, 68, 70, 72, 74, 76, 78, 80, 82, 84, 86, 88, 90, 92, 94, 96, 98, 100, 102, 104, 106, 108, 110, 112, 114, 116, 118, 120, 122, 124, 126, 128, 130, 132, 134, 136, 138, 140, 142, 144, 146, 148, 150, 152, 154, 156, 158, 160, 162, 164, 166, 168, 170, 172, 174, 176, 178, 180, 182, 184, 186, 188, 190, 192, 194, 196, 198, 200, 202, 204, 206, 208, 210, 212, 214, 216, 218, 220, 222, 224, 226, 228, 230, 232, 234, 236, 238, 240, 242, 244, 246, 248, 250, 252, 254, 256, 258, 260, 262, 264, 266, 268, 270, 272, 274, 276, 278, 280, 282, 284, 286, 288, 290, 292, 294, 296, 298, 300, 302, 304, 306, 308, 310, 312, 314, 316, 318, 320, 322, 324, 326, 328, 330, 332, 334, 336, 338, 340, 342, 344, 346, 348, 350, 352, 354, 356, 358, 360, 362, 364, 366, 368, 370, 372, 374, 376, 378, 380, 382, 384, 386, 388, 390, 392, 394, 396, 398, 400, 402, 404, 406, 408, 410, 412, 414, 416, 418, 420, 422, 424, 426, 428, 430, 432, 434, 436, 438, 440, 442, 444, 446, 448, 450, 452, 454, 456, 458, 460, 462, 464, 466, 468, 470, 472, 474, 476, 478, 480, 482, 484, 486, 488, 490, 492, 494, 496, 498, 500, 502, 504, 506, 508, 510, 512, 514, 516, 518, 520, 522, 524, 526, 528, 530, 532, 534, 536, 538, 540, 542, 544, 546, 548, 550, 552, 554, 556, 558, 560, 562, 564, 566, 568, 570, 572, 574, and 576; and the second portion of SEQ ID NO: 1 is selected from SEQ ID NOS: 1, 3, 5, 7, 9, 11, 13, 15, 17, 19, 21, 23, 25, 27, 29, 31, 33, 35, 37, 39, 41, 43, 45, 47, 49, 51, 53, 55, 57, 59, 61, 63, 65, 67, 69, 71, 73, 75, 77, 79, 81, 83, 85, 87, 89, 91, 93, 95, 97, 99, 101, 103, 105, 107, 109, 111, 113, 115, 117, 119, 121, 123, 125, 127, 129, 131, 133, 135, 137, 139, 141, 143, 145, 147, 149, 151, 153, 155, 157, 159, 161, 163, 165, 167, 169, 171, 173, 175, 177, 179, 181, 183, 185, 187, 189, 191, 193, 195, 197, 199, 201, 203, 205, 207, 209, 211, 213, 215, 217, 219, 221, 223, 225, 227, 229, 231, 233, 235, 237, 239, 241, 243, 245, 247, 249, 251, 253, 255, 257, 259, 261, 263, 265, 267, 269, 271, 273, 275, 277, 279, 281, 283, 285, 287, 289, 291, 293, 295, 297, 299, 301, 303, 305, 307, 309, 311, 313, 315, 317, 319, 321, 323, 325, 327, 329, 331, 333, 335, 337, 339, 341, 343, 345, 347, 349, 351, 353, 355, 357, 359, 361, 363, 365, 367, 369, 371, 373, 375, 377, 379, 381, 383, 385, 387, 389, 391, 393, 395, 397, 399, 401, 403, 405, 407, 409, 411, 413, 415, 417, 419, 421, 423, 425, 427, 429, 431, 433, 435, 437, 439, 441, 443, 445, 447, 449, 451, 453, 455, 457, 459, 461, 463, 465, 467, 469, 471, 473, 475, 477, 479, 481, 483, 485, 487, 489, 491, 493, 495, 497, 499, 501, 503, 505, 507, 509, 511, 513, 515, 517, 519, 521, 523, 525, 527, 529, 531, 533, 535, 537, 539, 541, 543, 545, 547, 549, 551, 553, 555, 557, 559, 561, 563, 565, 567, 569, 571, 573, 575, and 577.

[0053] In some embodiments of any of the methods herein, the first complementary fragment comprises at least 70% (e.g., at least 70%, at least 75%, at least 80%, at least 85%, at least 90%, at least 95%, 100%) sequence similarity with one of SEQ ID NOS: 578-1187 (or 100% identity to SEQ ID NOS: 3034 or 3035), and the second complementary fragment comprises at least 70% (e.g., at least 70%, at least 75%, at least 80%, at least 85%, at least 90%, at least 95%, 100%) sequence similarity with one of 1188-3033.

[0054] In some embodiments of any of the methods herein, the first complementary fragment comprises at least 70% (e.g., at least 70%, at least 75%, at least 80%, at least 85%, at least 90%, at least 95%, 100%) sequence identity with one of SEQ ID NOS: 578-1187 (or 100% identity to SEQ ID NOS: 3034 or 3035), and the second complementary fragment comprises at least 70% (e.g., at least 70%, at least 75%, at least 80%, at least 85%, at least 90%, at least 95%, 100%) sequence identity with one of 1188-3033.

[0055] In certain embodiments, cells, beads, nanoparticles, liposomes, or other structures are provided that display first and/or second complementary fragments of a split dehalogenase (e.g., spHT). In some embodiments, the cell-surface-displayed split dehalogenases find use in bacterial display, yeast display, mammalian display, phage display, etc. In some embodiments, surface-displayed split dehalogenases are free to interact with non-permeable substrates, can be used for detection of analytes in solution, or detect cell-cell interactions if both cells display the complementary split protein fragments.

[0056] Also provided herein are methods to detect an agent that alters the interaction of two proteins, which includes providing a sample having a cell comprising fusions of first and second complementary fragments of a split dehalogenase and first and second heterologous proteins (or expression vector(s) encoding the fusions), a lysate thereof, or an in vitro transcription/translation reaction comprising such components; a hydrolase substrate (e.g., haloalkane) with at least one functional group, and an agent under conditions effective to allow for association of the first and second fusion proteins. The agent is suspected of altering the interaction of the first and second heterologous proteins. The presence or amount of at least one functional group in the sample relative to a sample without the agent is detected. In some embodiments, multiple concentrations of the agents are assayed to determine the effect of the agent on the protein-protein interaction. In some embodiments, screens are provided in which a library (e.g., 10, 20, 50, 100, 200, 500, 1000, 2000, 5000, 10,000, 20,000, 100,000, or more) agents and/or heterologous protein sequences are screened using the system herein.

[0057] In another embodiment, methods are provided to detect an agent that alters the interaction of a molecule of interest and a protein. The methods include providing a sample comprising a cell comprising the molecule of interest bound to a first complementary fragment of a split dehalogenase and a fusion of a second complementary fragment of a split dehalogenase and a heterologous protein (or expression vector encoding the fusion), a lysate thereof, or an in vitro transcription/translation reaction comprising such components; a hydrolase substrate (e.g., haloalkane) with at least one functional group; and an agent suspected of altering the interaction between the heterologous amino acid sequence and a molecule of interest in the sample, under conditions effective to allow the heterologous protein to interact with the molecule of interest in the sample. The presence or amount of the functional group in the sample relative to a sample with the agent. In some embodiments, multiple concentrations of the agent are assayed to determine the effect of the agent on the protein-protein interaction. In some embodiments, screens are provided in which a library (e.g., 10, 20, 50, 100, 200, 500, 1000, 2000, 5000, 10,000, 20,000, 100,000, or more) of agents, molecules of interest, and/or heterologous protein sequences are screened using the system herein.

[0058] In some embodiments, provided herein are methods of detecting the presence of a molecule of interest. For instance, a cell is contacted with vector(s) comprising a promoter, e.g., a regulatable promoter, and a nucleic acid sequence encoding the two complementary fragments of a mutant hydrolase, at least one of which is fused to a protein which interacts with the molecule of interest. In one embodiment, a transfected cell is cultured under conditions in which the promoter induces transient expression of the fragments or regulated expression of one of the fragments and an activity associated with the labeled substrate is detected.

[0059] In some embodiments, methods are provided for expressing one or both complementary fragments of a split dehalogenase (e.g., spHT) within a cell. In some embodiments, the split dehalogenase, or a fragment thereof (or a fusion thereof), is transiently expressed by a cell. In some embodiments, a nucleic acid encoding the split dehalogenase or a fragment thereof (or a fusion thereof) is stably incorporated into a cell (or the genome thereof). In some embodiments, provided herein are cells or cell lines that encode and are capable of expressing one or both complementary fragments of a split dehalogenase (e.g., spHT) or a fusion thereof. In some embodiments, methods are provided for generating such cells, for example, by transfection of a nucleic acid vector into the cell and/or through CRISPR insertion of the split dehalogenase (e.g., spHT) construct into the genome of the cell.

[0060] Other methods described herein or that are performable with the split dehalogenases herein are within the scope of the present technology.

### BRIEF DESCRIPTION OF THE DRAWINGS

[0061] FIG. 1. Enzyme activity, thermal stability, and TEV protease-induced stability changes of circularly permuted HaloTag (“cpHT”) library variants. (A) E. coli lysates containing overexpressed cpHT proteins (position of circular permutation (“cp”) indicated along x-axis) were diluted 5-fold, then mixed 1:1 with CA-Alexa Fluor488 HaloTag ligand to 10 nM final concentration. Fluorescence polarization (FP) was monitored for 30 min, and initial velocities were calculated (ΔmP/s). Relative activity was calculated by dividing the cpHT velocities by that of lysate containing overexpressed 6×His-HaloTag7 control protein. (B) The same lysates (undiluted) were heated to 40-90° C. for 30 min, then cooled to room temperature (25° C.), and mixed 1:1 with CA-TMR to 10 nM final concentration. FP was measured after a 2 h room temperature incubation. The FP intensity is represented by gray shading, with darker shading indicating higher FP values. (C) The experiment in (B) was repeated using lysates treated with TEV protease. Changes in FP compared to the non-TEV-treated lysates are indicated by shading, with white indicating more negative changes and black indicating more positive changes.

[0062] FIG. 2. Fold increase in JF646 signal after rapamycin addition to non-overlapping split HaloTag fragments. E. coli lysates containing overexpressed sp HaloTag (“spHT”) protein fragments fused to FRB or FKBP were mixed in the combinations shown on the left of the table. Lysate mixtures were incubated at room temperature for 30 minutes with 50 nM rapamycin (or without rapamycin as a control). 100 nM Janelia Fluor 646 HaloTag ligand (JF646) was added 1:1 (vol) to the mixtures (50 nM final concentration). Samples were incubated for 24 hours at room temperature. Samples were analyzed for fluorescence (excitation: 646 nm, emission: 664 nm) on a Tecan Infinite M1000 microplate reader. Fold signal increase was computed as Fᵣₐₚ₊/Fᵣₐₚ₋ for each combination.

[0063] FIG. 3. Fold increase in JF646 signal after rapamycin addition to partially overlapping split HaloTag fragments. Experimental conditions were identical to those in FIG. 2.

[0064] FIG. 4. Optimized-gain (179-183) fluorescence (JF646) of spHT FRB/FKBP lysate mixtures pretreated for 24 h with varying concentrations of rapamycin (0-500 nM). Measurements were taken 24 h after JF646 addition to 50 nM (1:1 volume increase), which followed a 24 h pre-incubation with the indicated concentration of rapamycin at room temperature. Fold increase (lower graph) was calculated as the ratio of signal with rapamycin to that without rapamycin.

[0065] FIG. 5. JF646 signal blockage by FK506 competitive inhibition. spHT FRB/FKBP lysate mixtures were reacted with 500 nM rapamycin (or buffer) for 24 h at room temperature (same samples as in FIG. 4). Then, 20-fold molar excess of FK506 (or buffer) was added (1:1 volume increase) and incubated for 24 h at room temperature.

[0066] FIG. 6. JF646 signal reversal by FK506 competitive inhibition. Samples from FIG. 4 were allowed to react with JF646 for a total of 48 h. Then, FK506 (or buffer) was added in 10-fold molar excess to the 500 nM rapamycin samples (10 ul of 10× solution added to 40 ul samples).

[0067] FIG. 7. Gel electrophoresis of TMR-labeled spHT lysate mixtures under various rapamycin/FK506 conditions. Top gels: lysates were pre-incubated with (or without) 500 nM rapamycin for 24 h, then labeled with 5 μM TMR ligand for 24 h. Bottom gels: lysates were pre-incubated with 500 nM rapamycin. Then, lysates were incubated with 20-fold molar excess of FK506 for 24 h (or just buffer). Finally, lysates were incubated with 5 μM TMR ligand for 24 h.

[0068] FIG. 8. TMR fluorescence of SDS-PAGE separated spHT 19 lysate mixtures. The intensities of these bands are shown in FIG. 12. The smaller [1-19] fragment lysate is present at 10×, 1.25×, or 0× concentration relative to the larger [20-297] lysate in each group. Lysate mixtures were pre-incubated with 500 nM rapamycin for 30 min prior to TMR addition. TMR labeling was carried out at room temperature for 20 h.

[0069] FIG. 9. Band intensities of TMR-labeled spHT 19 lysate mixtures separated by SDS-PAGE (derived from image analysis of FIG. 11). Shading indicates the relative concentration of the [1-19] component, relative to constant [20-297] lysate, in each pair. The key at the right indicates the identities of the FRB and FKBP fusions used in each lysate combination.

[0070] FIG. 10. JF646 fluorescence as a function of increasing spHT [1-19] concentration, with spHT [20-297] concentrations held constant. Lysates were pre-incubated with 500 nM rapamycin for 30 min. Fluorescence was measured 19 h after JF646 addition (100 nM final) at a gain of 160.

[0071] FIG. 11. Lysate analysis of HeLa cells co-transfected with spHT FRB/FKBP constructs. HeLa cells were co-transfected with equal amounts of pF4Ag plasmids encoding CMV promoter-driven expression of spHT constructs. The constructs were HT(1-145)-FKBP+HT(146-297)-FRB; HT(1-157)-FKBP+HT(158-297)-FRB; and HT(1-195)-FKBP+HT(196-297)-FRB. Cells were also transfected with pF4Ag encoding non-split HaloTag with a 6× histidine tag as a positive control. Untransfected cells were included as a negative control. Lysates were prepared by passive lysis, treated with (or without) 50 nM rapamycin for 30 minutes, then reacted with 10 μM TMR HaloTag ligand for 24 hours. Samples were electrophoresed on SDS-PAGE, then imaged on a Typhoon FLA 9000 gel imager using the built-in Cy3 protocol.

[0072] FIG. 12. Live cell labeling with fluorogenic Janelia Fluor HaloTag ligands. Transfected cells described above were transferred to a 96-well plate, and treated with (or without) 50 nM rapamycin for 30 minutes at 37° C. JF646 or JF585 ligand was added (to 200 nM final concentration) to the cells. Cells were incubated at 37° C. for 22 hours. Fluorescence was measured (JF646: 646 nm/664 nm; JF585: 585 nm/609 nm) on a Tecan Infinite M1000 microplate reader. The instrument gain was manually set at 100 to allow direct comparison of the relative brightness of both dyes. Error bars show the standard deviation of three replicate labeling reactions.

[0073] FIG. 13. TMR labeled lysates of HeLa cells transfected with HaloTag or spHT plasmids. Cells were also transfected with pF4Ag encoding non-split HaloTag with a 6× histidine tag as a positive control. Untransfected cells were included as a negative control. Lysates were prepared by passive lysis, treated with (or without) 50 nM or 500 nM rapamycin for 30 minutes, then reacted with 10 μM TMR HaloTag ligand for 24 hours. Samples were electrophoresed on SDS-PAGE, then imaged on a Typhoon FLA 9000 gel imager using the built-in Cy3 protocol.

[0074] FIG. 14. Fluorescence of live HeLa cells labeled with 200 nM JF646 or JF585 for 18 hr in the presence of 50 nM rapamycin. Error bars show standard deviation of three replicate samples. 6×His-HT7 data are omitted from the graphs to prevent y-axis compression, but are: JF646: 15700±1150AU (rap+) and 14200±2450AU (rap−); JF585: 36100±3160AU (rap+) and 35300±6640AU (rap−).

[0075] FIG. 15A-B. Exemplary ‘dual warhead’ haloalkane ligands. FIG. 15A A SNAP-tag ligand linked to a chloroalkane by a suitable linker. FIG. 15B A photocaged TMP ligand capable of binding to E. coli dihydrofolate reductase (DHFR) upon uncaging, linked to a chloroalkane by a suitable linker.

[0076] FIG. 16. Complementation of split HaloTag fragments containing internal deletions as fusions to FRB or FKBP. Proteins were expressed separately in E. coli lysates and combined. Complementation of each pair was induced with the addition of 1 uM Rapamycin (left) or PBS (right) for 2 hours at room temperature and then labeled with 10 uM TMR HaloTag ligand prior to resolution by SDS-PAGE and fluorescence detection.

[0077] FIG. 17. Complementation with internal split HaloTag fragments containing overlapped and gapped regions as fusions to FRB or FKBP. Proteins were expressed separately in E. coli lysates and combined. Complementation of each pair was induced with the addition of 1 uM Rapamycin (right) or PBS (left) for 2 hours at room temperature and then labeled with 10 uM TMR HaloTag ligand prior to resolution by SDS-PAGE and fluorescence detection.

[0078] FIG. 18. Domain-swapping with a full length cpHaloTag D106A mutant restores activity of cpHaloTags internal split fragments. Proteins were expressed separately in E. coli lysates as FRB or FKBP fusions and combined. Complementation of each pair was induced with the addition of 500 nM Rapamycin (right) or PBS (left) for 30 minutes at room temperature and then labeled with 10 uM TMR HaloTag ligand prior to resolution by SDS-PAGE and fluorescence detection. Red boxes indicate detectable TMR labeling of active pairs.

[0079] FIG. 19A-B. Complementation and reversibility of spHT-FRB/FKBP constructs with added NanoBiT functionality. Proteins were expressed separately in E. coli lysates as FRB or FKBP fusions with NanoBiT tags and combined. Construct labels represent the boundary of split fragments (i.e., spHT146 was expressed as HT(1-145)-FKBP-SmBiT and HT(146-297)-FRB-LgBiT fragments). Complementation of each pair was induced with the addition of 500 nM Rapamycin for 1 hour. FK506 was added at 5 uM and incubated for 4 hours in order to test reversibility. Each reaction was then tested for FIG. 19A NanoBiT and FIG. 19B JF646 labeling activity after separating reactions. Error bars show standard deviation of duplicate measurements.

[0080] FIG. 20A-C. Complementation of split HaloTag fragments in human body fluid matrices. Proteins were expressed separately in E. coli as FRB or FKBP fusions and combined after lysis. To each lysis combination, 0-20% human plasma FIG. 20A, serum FIG. 20B, or urine FIG. 20C followed by Rapamycin (where indicated) was added and incubated for 2 hours at room temperature. Aliquots of each reaction were tested separately for NanoBiT assay luminescence or HaloTag activity by binding of fluorescent JF635 HaloTag ligand. Error bars represent one standard deviation from the means of duplicate reactions.

[0081] FIG. 21A-B. Comparison of complementation activity of N-terminal split HaloTag constructs. Each HaloTag fragment was expressed separately in E. coli and then combined after lysis. The smaller N-terminal HaloTag fragments as FKBP fusions were tested against the larger fragments of FIG. 21A HT(23-297)-FRB or FIG. 21B HT(22-297)-FRB. To each reaction, 500 nM Rapamycin was added and incubated at room temperature for 2.5 hours prior to addition of 50 nM JF646 ligand and measurement of fluorescence at the indicated timepoint.

[0082] FIG. 22. Comparison of truncations of N-terminal split HaloTag constructs. Each HaloTag fragment was expressed separately in E. coli and then combined after lysis. The smaller N-terminal HaloTag fragments as FKBP fusions were tested against the larger fragments of HT(23-297)-FRB. To each reaction, 500 nM Rapamycin was added and incubated at room temperature for 2 hours prior to addition of 50 nM JF646 ligand and measurement of fluorescence at the indicated timepoint.

[0083] FIG. 23A-B. Complementation of N-terminal split HaloTag as fusions to NanoBiT tags. Each HaloTag fragment was expressed separately in E. coli and then combined after lysis. The FKBP-HT(1-33) fragment as SmBiT or HiBiT fragment fusions were tested against HT(23-297)-FRB fragment fused to LgBiT. To each reaction, 500 nM Rapamycin was added and incubated at room temperature for 2 hours prior to separation of the reaction volume for either addition of JF646 ligand and measurement of fluorescence or addition of NanoGlo® assay reagent for luminescence measurement.

[0084] FIG. 24A-B. Complementation of N-terminal split HaloTag as fusions to NanoBiT tags. Each HaloTag fragment was expressed separately in E. coli and then combined after lysis. The FKBP-HaloTag fragments as C-terminal HiBiT fusions were tested against the HT(23-297)-FRB fragment. To each reaction, 500 nM Rapamycin was added and incubated at room temperature for 2 hours prior to separation of the reaction volume for either FIG. 21A addition of JF646 ligand and measurement of fluorescence or FIG. 21B addition of purified LgBiT and NanoGlo® assay reagent for luminescence measurement.

[0085] FIG. 25A-B. Mutations in N-terminal split HaloTag fragments improve fluorescence intensity and fold response. Each HaloTag fragment was expressed separately in E. coli and then combined after lysis. The smaller N-terminal HaloTag fragments as FKBP fusions were tested against the larger fragments of HT(23-297)-FRB. To each reaction, 500 nM Rapamycin was added and incubated at room temperature for 2 hours prior to addition of 50 nM JF646 ligand and measurement of fluorescence at the indicated timepoint. FIG. 25A Fluorescence intensity is shown for +Rapamycin condition to show the overall system brightness relative to FIG. 25B Fold response following Rapamycin addition.

[0086] FIG. 26A-C. Mutations in N-terminal split HaloTag fragments improve fluorescence intensity and fold response with multiple HaloTag ligands. Each HaloTag fragment was expressed separately in E. coli and then combined after lysis. The smaller N-terminal HaloTag fragments as FKBP fusions were tested against the larger fragments of HT(22-297)-FRB or HT(23-297)-FRB. To each reaction, 500 nM Rapamycin was added and incubated at room temperature for 2 hours prior to addition of 50 nM FIG. 26A JF549, FIG. 26B JF635, or FIG. 26C JF646 ligand and measurement of fluorescence at the indicated timepoint. Constructs with the Q165H+P174R mutations are labeled with “+HT9”. Relative brightness was calculated as the fractional brightness compared to a HaloTag7 control.

[0087] FIG. 27A-B. Activity of split HaloTag combinations in live mammalian cells. HeLa cells transiently transfected with plasmids expressing the large HaloTag fragments fused to FRB and small HaloTag fragments fused to FKBP were incubated for 2 hours with 500 nM Rapamycin, followed by labeling with 50 nM JF646 HaloTag ligand prior to detection of fluorescence at indicated timepoints. FIG. 27A Fluorescence intensity of JF646 HaloTag ligand in live cell assays over time comparing cells treated or untreated with Rapamycin. FIG. 27B Fold response of each assay condition was calculated as the ratio of fluorescence signal for +Rapamycin/−Rapamycin treated cells.

[0088] FIG. 28A-B. Live cell imaging of split HaloTag function in mammalian cells. HeLa cells transiently transfected with FKBP-HT(1-30)+HT(23-297)-FRB were incubated overnight with 1 uM Rapamycin. Prior to imaging by confocal microscopy, cells were labeled with 100 nM JF646 HaloTag ligand and nuclei stained with DAPI. FIG. 28A Image data was collected in Far-red channel (Ex. 637 nm, left) and blue/Far-red/DIC merged channel (Ex. 408 nm, right). FIG. 28B Comparison of quantitated far-red channel fluorescence intensity for cells expressing split HaloTag fragments versus HaloTag7.

[0089] FIG. 29A-C. Live cell imaging of split HaloTag complementation activity in mammalian cells. HeLa cells transiently transfected with EGFP-FKBP-HT(1-30)+HT(23-297)-FRB were incubated overnight with or without 1 uM Rapamycin. Prior to imaging by confocal microscopy, cells were labeled with 100 nM JF646 HaloTag ligand. FIG. 29A Image data was collected in Far-red channel (Ex. 637 nm, left) and Green channel (Ex. 488 nm, right) for cells treated with (top) or without (bottom) Rapamycin. Comparison of quantitated far-red and green channel fluorescence intensities for cells expressing split HaloTag fragments relative to the signal from the EGFP fusion to FKBP-HT(1-30) for conditions FIG. 29B with Rapamycin or FIG. 29C without Rapamycin.

[0090] FIG. 30. Complementation of HaloTag[22-297](M2F) fragment in E. coli lysates using a synthetic HaloTag[3-19] peptide. HaloTag[22-297](M2F) was expressed in E. coli lysates and combined with indicated amounts of synthetic HaloTag[3-19] peptide. Reactions were incubated for 2 hours at room temperature and then labeled with 50 nM JF646 HaloTag ligand prior to fluorescence detection.

[0091] FIG. 31. Complementation of HaloTag[22-297](Q145H+P154R) fragment in E. coli lysates using a synthetic HaloTag[3-19] peptide. HaloTag[22-297](Q145H+P154R) was expressed in E. coli lysates and combined with indicated amounts of synthetic HaloTag[3-19] peptide. Reactions were incubated for 2 hours at room temperature and then labeled with 50 nM JF646 HaloTag ligand prior to fluorescence detection.

[0092] FIG. 32. Complementation of HaloTag[22-297](M2F) fragments using a synthetic HaloTag[3-19] peptide in a kinetic labeling assay. HaloTag[22-297](M2F) was expressed in E. coli lysates and combined with indicated amounts of synthetic HaloTag[3-19] peptide. Reactions were incubated for 2 hours at room temperature and then labeled with 10 nM TMR HaloTag ligand while reading fluorescence polarization of the reaction.

[0093] FIG. 33. Complementation of HaloTag[22-297](Q145H+P154R) fragment using a synthetic HaloTag[3-19] peptide in a kinetic labeling assay. HaloTag[22-297](Q145H+P154R) was expressed in E. coli lysates and combined with indicated amounts of synthetic HaloTag[3-19] peptide. Reactions were incubated for 2 hours at room temperature and then labeled with 10 nM TMR HaloTag ligand while reading fluorescence polarization of the reaction.

[0094] FIG. 34. Complementation of purified 6×His-HaloTag[22-297](M2F) fragment using a synthetic HaloTag[3-19] peptide. Purified 6×His-HaloTag[22-297](M2F) at 80 nM was combined with indicated amounts of synthetic HaloTag[3-19] peptide. Reactions were incubated for 18 hours at room temperature and then labeled with 100 nM JF646 HaloTag ligand prior to fluorescence detection.

[0095] FIG. 35. Fold response upon complementation of purified 6×His-HaloTag[22-297](M2F) fragment using a synthetic HaloTag[3-19] peptide. Purified 6×His-HaloTag[22-297](M2F) at 80 nM was combined with indicated amounts of synthetic HaloTag[3-19] peptide. Reactions were incubated for 18 hours at room temperature and then labeled with 100 nM JF646 HaloTag ligand prior to fluorescence detection.

[0096] FIG. 36. Complementation of purified 6×His-HaloTag[22-297](M2F) fragment using a variant of synthetic HaloTag[3-19] peptide. Purified 6×His-HaloTag[22-297](M2F) at 80 nM was combined with indicated amounts of synthetic HaloTag[3-19] peptide with two addition N-terminal Arginine residues (RREIGTGFPFDPHYVEVLG). Reactions were incubated for 18 hours at room temperature and then labeled with 100 nM JF646 HaloTag ligand prior to fluorescence detection.

[0097] FIG. 37. Fold response upon complementation of purified 6×His-HaloTag[22-297](M2F) fragment using a variant of synthetic HaloTag[3-19] peptide. Purified 6×His-HaloTag[22-297](M2F) at 80 nM was combined with indicated amounts of synthetic HaloTag[3-19] peptide with two addition N-terminal Arginine residues (RREIGTGFPFDPHYVEVLG). Reactions were incubated for 18 hours at room temperature and then labeled with 100 nM JF646 HaloTag ligand prior to fluorescence detection.

[0098] FIG. 38. Complementation of purified 6×His-HaloTag[22-297](Q145H+P154R) fragment using a synthetic HaloTag[3-19] peptide. Purified 6×His-HaloTag[22-297](Q145H+P154R) at 80 nM was combined with indicated amounts of synthetic HaloTag[3-19] peptide. Reactions were incubated for 18 hours at room temperature and then labeled with 100 nM JF646 HaloTag ligand prior to fluorescence detection.

[0099] FIG. 39. Fold response upon complementation of purified 6×His-HaloTag[22-297](Q145H+P154R) fragment using a synthetic HaloTag[3-19] peptide. Purified 6×His-HaloTag[22-297](Q145H+P154R) at 80 nM was combined with indicated amounts of synthetic HaloTag[3-19] peptide. Reactions were incubated for 18 hours at room temperature and then labeled with 100 nM JF646 HaloTag ligand prior to fluorescence detection.

[0100] FIG. 40. Complementation of purified 6×His-HaloTag[22-297](Q145H+P154R) fragments using a variant of synthetic HaloTag[3-19] peptide. Purified 6×His-HaloTag[22-297](Q145H+P154R) at 80 nM was combined with indicated amounts of synthetic HaloTag[3-19] peptide with two addition N-terminal Arginine residues (RREIGTGFPFDPHYVEVLG). Reactions were incubated for 18 hours at room temperature and then labeled with 100 nM JF646 HaloTag ligand prior to fluorescence detection.

[0101] FIG. 41. Fold response upon complementation of purified 6×His-HaloTag[22-297](Q145H+P154R) fragment using a variant of synthetic HaloTag[3-19] peptide. Purified 6×His-HaloTag[22-297](Q145H+P154R) at 80 nM was combined with indicated amounts of synthetic HaloTag[3-19] peptide with two addition N-terminal Arginine residues (RREIGTGFPFDPHYVEVLG). Reactions were incubated for 18 hours at room temperature and then labeled with 100 nM JF646 HaloTag ligand prior to fluorescence detection.

[0102] FIG. 42. Complementation of purified 6×His-HaloTag[22-297](M2F) fragment using shorter variants of synthetic HaloTag[3-19] peptide. Purified 6×His-HaloTag[22-297](M2F) at 80 nM was combined with indicated amounts of synthetic HaloTag[3-19] peptide and shorter variants comprised of HaloTag[8-19] fragments. Reactions were incubated for 18 hours at room temperature and then labeled with 10 nM TMR HaloTag ligand prior to fluorescence detection.

[0103] FIG. 43. Complementation of purified HaloTag[22-297](Q145H+P154R)-6×His fragment using shorter variants of synthetic HaloTag[3-19] peptide. Purified HaloTag[22-297](Q145H+P154R)-6×His at 80 nM was combined with indicated amounts of synthetic HaloTag[3-19] peptide and shorter variants comprised of HaloTag[8-19] fragments. Reactions were incubated for 18 hours at room temperature and then labeled with 10 nM TMR HaloTag ligand prior to fluorescence detection.

[0104] FIG. 44. Complementation of split HaloTag fragments as fusions to FRB or FKBP containing all HaloTag[3-19] mutations at position 1. HaloTag[22-297](M2F)-FRB and FKBP-HaloTag[3-19] variants were expressed separately in E. coli lysates and combined. Complementation of each pair was induced with the addition of 500 nM Rapamycin for 2 hours at room temperature and then labeled with 50 nM JF646 HaloTag ligand prior to fluorescence detection.

[0105] FIG. 45. Complementation of split HaloTag fragments as fusions to FRB or FKBP containing all HaloTag[3-19] mutations at position 2. HaloTag[22-297](M2F)-FRB and FKBP-HaloTag[3-19] variants were expressed separately in E. coli lysates and combined. Complementation of each pair was induced with the addition of 500 nM Rapamycin for 2 hours at room temperature and then labeled with 50 nM JF646 HaloTag ligand prior to fluorescence detection.

[0106] FIG. 46. Complementation of split HaloTag fragments as fusions to FRB or FKBP containing all HaloTag[3-19] mutations at position 3. HaloTag[22-297](M2F)-FRB and FKBP-HaloTag[3-19] variants were expressed separately in E. coli lysates and combined. Complementation of each pair was induced with the addition of 500 nM Rapamycin for 2 hours at room temperature and then labeled with 50 nM JF646 HaloTag ligand prior to fluorescence detection.

[0107] FIG. 47. Complementation of split HaloTag fragments as fusions to FRB or FKBP containing all HaloTag[3-19] mutations at position 4. HaloTag[22-297](M2F)-FRB and FKBP-HaloTag[3-19] variants were expressed separately in E. coli lysates and combined. Complementation of each pair was induced with the addition of 500 nM Rapamycin for 2 hours at room temperature and then labeled with 50 nM JF646 HaloTag ligand prior to fluorescence detection.

[0108] FIG. 48. Complementation of split HaloTag fragments as fusions to FRB or FKBP containing all HaloTag[3-19] mutations at position 5. HaloTag[22-297](M2F)-FRB and FKBP-HaloTag[3-19] variants were expressed separately in E. coli lysates and combined. Complementation of each pair was induced with the addition of 500 nM Rapamycin for 2 hours at room temperature and then labeled with 50 nM JF646 HaloTag ligand prior to fluorescence detection.

[0109] FIG. 49. Complementation of split HaloTag fragments as fusions to FRB or FKBP containing all HaloTag[3-19] mutations at position 6. HaloTag[22-297](M2F)-FRB and FKBP-HaloTag[3-19] variants were expressed separately in E. coli lysates and combined. Complementation of each pair was induced with the addition of 500 nM Rapamycin for 2 hours at room temperature and then labeled with 50 nM JF646 HaloTag ligand prior to fluorescence detection.

[0110] FIG. 50. Complementation of split HaloTag fragments as fusions to FRB or FKBP containing all HaloTag[3-19] mutations at position 7. HaloTag[22-297](M2F)-FRB and FKBP-HaloTag[3-19] variants were expressed separately in E. coli lysates and combined. Complementation of each pair was induced with the addition of 500 nM Rapamycin for 2 hours at room temperature and then labeled with 50 nM JF646 HaloTag ligand prior to fluorescence detection.

[0111] FIG. 51. Complementation of split HaloTag fragments as fusions to FRB or FKBP containing all HaloTag[3-19] mutations at position 8. HaloTag[22-297](M2F)-FRB and FKBP-HaloTag[3-19] variants were expressed separately in E. coli lysates and combined. Complementation of each pair was induced with the addition of 500 nM Rapamycin for 2 hours at room temperature and then labeled with 50 nM JF646 HaloTag ligand prior to fluorescence detection.

[0112] FIG. 52. Complementation of split HaloTag fragments as fusions to FRB or FKBP containing all HaloTag[3-19] mutations at position 9. HaloTag[22-297](M2F)-FRB and FKBP-HaloTag[3-19] variants were expressed separately in E. coli lysates and combined. Complementation of each pair was induced with the addition of 500 nM Rapamycin for 2 hours at room temperature and then labeled with 50 nM JF646 HaloTag ligand prior to fluorescence detection.

[0113] FIG. 53. Complementation of split HaloTag fragments as fusions to FRB or FKBP containing all HaloTag[3-19] mutations at position 10. HaloTag[22-297](M2F)-FRB and FKBP-HaloTag[3-19] variants were expressed separately in E. coli lysates and combined. Complementation of each pair was induced with the addition of 500 nM Rapamycin for 2 hours at room temperature and then labeled with 50 nM JF646 HaloTag ligand prior to fluorescence detection.

[0114] FIG. 54. Complementation of split HaloTag fragments as fusions to FRB or FKBP containing all HaloTag[3-19] mutations at position 11. HaloTag[22-297](M2F)-FRB and FKBP-HaloTag[3-19] variants were expressed separately in E. coli lysates and combined. Complementation of each pair was induced with the addition of 500 nM Rapamycin for 2 hours at room temperature and then labeled with 50 nM JF646 HaloTag ligand prior to fluorescence detection.

[0115] FIG. 55. Complementation of split HaloTag fragments as fusions to FRB or FKBP containing all HaloTag[3-19] mutations at position 12. HaloTag[22-297](M2F)-FRB and FKBP-HaloTag[3-19] variants were expressed separately in E. coli lysates and combined. Complementation of each pair was induced with the addition of 500 nM Rapamycin for 2 hours at room temperature and then labeled with 50 nM JF646 HaloTag ligand prior to fluorescence detection.

[0116] FIG. 56. Complementation of split HaloTag fragments as fusions to FRB or FKBP containing all HaloTag[3-19] mutations at position 13. HaloTag[22-297](M2F)-FRB and FKBP-HaloTag[3-19] variants were expressed separately in E. coli lysates and combined. Complementation of each pair was induced with the addition of 500 nM Rapamycin for 2 hours at room temperature and then labeled with 50 nM JF646 HaloTag ligand prior to fluorescence detection.

[0117] FIG. 57. Complementation of split HaloTag fragments as fusions to FRB or FKBP containing all HaloTag[3-19] mutations at position 14. HaloTag[22-297](M2F)-FRB and FKBP-HaloTag[3-19] variants were expressed separately in E. coli lysates and combined. Complementation of each pair was induced with the addition of 500 nM Rapamycin for 2 hours at room temperature and then labeled with 50 nM JF646 HaloTag ligand prior to fluorescence detection.

[0118] FIG. 58. Complementation of split HaloTag fragments as fusions to FRB or FKBP containing all HaloTag[3-19] mutations at position 15. HaloTag[22-297](M2F)-FRB and FKBP-HaloTag[3-19] variants were expressed separately in E. coli lysates and combined. Complementation of each pair was induced with the addition of 500 nM Rapamycin for 2 hours at room temperature and then labeled with 50 nM JF646 HaloTag ligand prior to fluorescence detection.

[0119] FIG. 59. Complementation of split HaloTag fragments as fusions to FRB or FKBP containing all HaloTag[3-19] mutations at position 16. HaloTag[22-297](M2F)-FRB and FKBP-HaloTag[3-19] variants were expressed separately in E. coli lysates and combined. Complementation of each pair was induced with the addition of 500 nM Rapamycin for 2 hours at room temperature and then labeled with 50 nM JF646 HaloTag ligand prior to fluorescence detection.

[0120] FIG. 60. Complementation of split HaloTag fragments as fusions to FRB or FKBP containing all HaloTag[3-19] mutations at position 17. HaloTag[22-297](M2F)-FRB and FKBP-HaloTag[3-19] variants were expressed separately in E. coli lysates and combined. Complementation of each pair was induced with the addition of 500 nM Rapamycin for 2 hours at room temperature and then labeled with 50 nM JF646 HaloTag ligand prior to fluorescence detection.

[0121] FIG. 61. Complementation of split HaloTag fragments as fusions to FRB or FKBP containing all HaloTag[3-19] mutations at position 1-17 in the absence of Rapamycin. HaloTag[22-297](M2F)-FRB and FKBP-HaloTag[3-19] variants were expressed separately in E. coli lysates and combined. Complementation of each pair was induced with the addition of 500 nM Rapamycin for 2 hours at room temperature and then labeled with 50 nM JF646 HaloTag ligand prior to fluorescence detection.

[0122] FIG. 62. Complementation of split HaloTag fragments as fusions to FRB or FKBP containing all HaloTag[3-19] mutations at position 1-17 in the presence of Rapamycin. HaloTag[22-297](M2F)-FRB and FKBP-HaloTag[3-19] variants were expressed separately in E. coli lysates and combined. Complementation of each pair was induced with the addition of 500 nM Rapamycin for 2 hours at room temperature and then labeled with 50 nM JF646 HaloTag ligand prior to fluorescence detection.

[0123] FIG. 63. Complementation of split HaloTag fragments as fusions to FRB or FKBP containing HaloTag[3-19] double mutation combinations, Set #1. HaloTag[22-297](M2F)-FRB and FKBP-HaloTag[3-19] variants were expressed separately in E. coli lysates and combined. Complementation of each pair was induced with the addition of 500 nM Rapamycin for 2 hours at room temperature and then labeled with 50 nM JF646 HaloTag ligand prior to fluorescence detection.

[0124] FIG. 64. Complementation of split HaloTag fragments as fusions to FRB or FKBP containing HaloTag[3-19] double mutation combinations, Set #2. HaloTag[22-297](M2F)-FRB and FKBP-HaloTag[3-19] variants were expressed separately in E. coli lysates and combined. Complementation of each pair was induced with the addition of 500 nM Rapamycin for 2 hours at room temperature and then labeled with 50 nM JF646 HaloTag ligand prior to fluorescence detection.

[0125] FIG. 65. Complementation of split HaloTag fragments as fusions to FRB or FKBP containing HaloTag[3-19] double mutation combinations, Set #3. HaloTag[22-297](M2F)-FRB and FKBP-HaloTag[3-19] variants were expressed separately in E. coli lysates and combined. Complementation of each pair was induced with the addition of 500 nM Rapamycin for 2 hours at room temperature and then labeled with 50 nM JF646 HaloTag ligand prior to fluorescence detection.

[0126] FIG. 66. Complementation of split HaloTag fragments as fusions to FRB or FKBP containing HaloTag[3-19] triple mutation combinations, Set #1. HaloTag[22-297](M2F)-FRB and FKBP-HaloTag[3-19] variants were expressed separately in E. coli lysates and combined. Complementation of each pair was induced with the addition of 500 nM Rapamycin for 2 hours at room temperature and then labeled with 50 nM JF646 HaloTag ligand prior to fluorescence detection.

[0127] FIG. 67. Complementation of split HaloTag fragments as fusions to FRB or FKBP containing HaloTag[3-19] triple mutation combinations, Set #2. HaloTag[22-297](M2F)-FRB and FKBP-HaloTag[3-19] variants were expressed separately in E. coli lysates and combined. Complementation of each pair was induced with the addition of 500 nM Rapamycin for 2 hours at room temperature and then labeled with 50 nM JF646 HaloTag ligand prior to fluorescence detection.

[0128] FIG. 68. Complementation of split HaloTag fragments as fusions to FRB or FKBP containing HaloTag[3-19] triple mutation combinations, Set #3. HaloTag[22-297](M2F)-FRB and FKBP-HaloTag[3-19] variants were expressed separately in E. coli lysates and combined. Complementation of each pair was induced with the addition of 500 nM Rapamycin for 2 hours at room temperature and then labeled with 50 nM JF646 HaloTag ligand prior to fluorescence detection.

[0129] FIG. 69. Complementation of split HaloTag fragments as fusions to FRB or FKBP containing HaloTag[3-19] triple mutation combinations, Set #4. HaloTag[22-297](M2F)-FRB and FKBP-HaloTag[3-19] variants were expressed separately in E. coli lysates and combined. Complementation of each pair was induced with the addition of 500 nM Rapamycin for 2 hours at room temperature and then labeled with 50 nM JF646 HaloTag ligand prior to fluorescence detection.

[0130] FIG. 70. Complementation of split HaloTag fragments as fusions to FRB or FKBP containing HaloTag[3-19] with 4-8 mutation combinations, Set #1. HaloTag[22-297](M2F)-FRB and FKBP-HaloTag[3-19] variants were expressed separately in E. coli lysates and combined. Complementation of each pair was induced with the addition of 500 nM Rapamycin for 2 hours at room temperature and then labeled with 50 nM JF646 HaloTag ligand prior to fluorescence detection.

[0131] FIG. 71. Complementation of split HaloTag fragments as fusions to FRB or FKBP containing HaloTag[3-19] with 4-8 mutation combinations, Set #2. HaloTag[22-297](M2F)-FRB and FKBP-HaloTag[3-19] variants were expressed separately in E. coli lysates and combined. Complementation of each pair was induced with the addition of 500 nM Rapamycin for 2 hours at room temperature and then labeled with 50 nM JF646 HaloTag ligand prior to fluorescence detection.

[0132] FIG. 72. Complementation of split HaloTag fragments as fusions to FRB or FKBP containing HaloTag[3-19] with 8-14 mutation combinations, Set #1. HaloTag[22-297](M2F)-FRB and FKBP-HaloTag[3-19] variants were expressed separately in E. coli lysates and combined. Complementation of each pair was induced with the addition of 500 nM Rapamycin for 2 hours at room temperature and then labeled with 50 nM JF646 HaloTag ligand prior to fluorescence detection.

[0133] FIG. 73. Complementation of split HaloTag fragments as fusions to FRB or FKBP containing HaloTag[3-19] with 8-14 mutation combinations, Set #2. HaloTag[22-297](M2F)-FRB and FKBP-HaloTag[3-19] variants were expressed separately in E. coli lysates and combined. Complementation of each pair was induced with the addition of 500 nM Rapamycin for 2 hours at room temperature and then labeled with 50 nM JF646 HaloTag ligand prior to fluorescence detection.

[0134] FIG. 74. Complementation of split HaloTag fragments as fusions to FRB or FKBP containing HaloTag[3-19] with combinations of 17 mutations. HaloTag[22-297](M2F)-FRB and FKBP-HaloTag[3-19] variants were expressed separately in E. coli lysates and combined. Complementation of each pair was induced with the addition of 500 nM Rapamycin for 2 hours at room temperature and then labeled with 50 nM JF646 HaloTag ligand prior to fluorescence detection.

[0135] FIG. 75. Relative fluorescence intensity of HaloTag[22-297](M2F) mutants with synthetic HaloTag[3-19] peptide, Set #1. HaloTag[22-297](M2F)-6×His variants were expressed in E. coli lysates and combined with 31 micromolar synthetic HaloTag[3-19] peptide. Reactions were incubated for 2 hours at room temperature and then labeled with 50 nM JF646 HaloTag ligand prior to fluorescence detection. The fluorescence intensity of mutants was normalized to the intensity of the unmutated HaloTag[22-297](M2F) control.

[0136] FIG. 76. Relative fluorescence intensity of HaloTag[22-297](M2F) mutants with synthetic HaloTag[3-19] peptide, Set #2. HaloTag[22-297](M2F)-6×His variants were expressed in E. coli lysates and combined with 31 micromolar synthetic HaloTag[3-19] peptide. Reactions were incubated for 2 hours at room temperature and then labeled with 50 nM JF646 HaloTag ligand prior to fluorescence detection. The fluorescence intensity of mutants was normalized to the intensity of the unmutated HaloTag[22-297](M2F) control.

[0137] FIG. 77. Relative fluorescence intensity of HaloTag[22-297](M2F) mutants with synthetic HaloTag[3-19] peptide, Set #3. HaloTag[22-297](M2F)-6×His variants were expressed in E. coli lysates and combined with 31 micromolar synthetic HaloTag[3-19] peptide. Reactions were incubated for 2 hours at room temperature and then labeled with 50 nM JF646 HaloTag ligand prior to fluorescence detection. The fluorescence intensity of mutants was normalized to the intensity of the unmutated HaloTag[22-297](M2F) control.

[0138] FIG. 78. Relative improvement in fold response of HaloTag[22-297](M2F) mutants with synthetic HaloTag[3-19] peptide, Set #1. HaloTag[22-297](M2F)-6×His variants were expressed in E. coli lysates and combined with 31 micromolar synthetic HaloTag[3-19] peptide. Reactions were incubated for 2 hours at room temperature and then labeled with 50 nM JF646 HaloTag ligand prior to fluorescence detection. The fold response of mutants was normalized to the fold response of the unmutated HaloTag[22-297](M2F) control.

[0139] FIG. 79. Relative improvement in fold response of HaloTag[22-297](M2F) mutants with synthetic HaloTag[3-19] peptide, Set #2. HaloTag[22-297](M2F)-6×His variants were expressed in E. coli lysates and combined with 31 micromolar synthetic HaloTag[3-19] peptide. Reactions were incubated for 2 hours at room temperature and then labeled with 50 nM JF646 HaloTag ligand prior to fluorescence detection. The fold response of mutants was normalized to the fold response of the unmutated HaloTag[22-297](M2F) control.

[0140] FIG. 80. Relative improvement in fold response of HaloTag[22-297](M2F) mutants with synthetic HaloTag[3-19] peptide, Set #3. HaloTag[22-297](M2F)-6×His variants were expressed in E. coli lysates and combined with 31 micromolar synthetic HaloTag[3-19] peptide. Reactions were incubated for 2 hours at room temperature and then labeled with 50 nM JF646 HaloTag ligand prior to fluorescence detection. The fold response of mutants was normalized to the fold response of the unmutated HaloTag[22-297](M2F) control.

[0141] FIG. 81. Relative fluorescence intensity of HaloTag[22-297](M2F) double mutants with synthetic HaloTag[3-19] peptide. HaloTag[22-297](M2F)-6×His variants were expressed in E. coli lysates and combined with 31 micromolar synthetic HaloTag[3-19] peptide. Reactions were incubated for 2 hours at room temperature and then labeled with 50 nM JF646 HaloTag ligand prior to fluorescence detection. The fluorescence intensity of mutants was normalized to the intensity of the unmutated HaloTag[22-297](M2F) control.

[0142] FIG. 82. Relative improvement in fold response of HaloTag[22-297](M2F) double mutants with synthetic HaloTag[3-19] peptide. HaloTag[22-297](M2F)-6×His variants were expressed in E. coli lysates and combined with 31 micromolar synthetic HaloTag[3-19] peptide. Reactions were incubated for 2 hours at room temperature and then labeled with 50 nM JF646 HaloTag ligand prior to fluorescence detection. The fold response of mutants was normalized to the fold response of the unmutated HaloTag[22-297](M2F) control.

[0143] FIG. 83. Relative fluorescence intensity of HaloTag[22-297](M2F) variants containing multiple mutations with synthetic HaloTag[3-19] peptide. HaloTag[22-297](M2F)-6×His variants were expressed in E. coli lysates and combined with 31 micromolar synthetic HaloTag[3-19] peptide. Reactions were incubated for 2 hours at room temperature and then labeled with 50 nM JF646 HaloTag ligand prior to fluorescence detection. The fluorescence intensity of mutants was normalized to the intensity of the unmutated HaloTag[22-297](M2F) control.

[0144] FIG. 84. Complementation of HaloTag[22-297](M2F) mutants with excess HaloTag[3-19] synthetic peptide, Set #1. HaloTag[22-297](M2F) mutants were expressed in E. coli lysates and combined with 250 micromolar synthetic HaloTag[3-19] peptide to saturate binding. Reactions were incubation at room temperature for 2 hours, labeled with 50 nM JF646 HaloTag ligand, and measured for fluorescence after 60 minutes.

[0145] FIG. 85. Complementation of HaloTag[22-297](M2F) mutants with excess HaloTag[3-19] synthetic peptide, Set #2. HaloTag[22-297](M2F) mutants were expressed in E. coli lysates and combined with 250 micromolar synthetic HaloTag[3-19] peptide to saturate binding. Reactions were incubation at room temperature for 2 hours, labeled with 50 nM JF646 HaloTag ligand, and measured for fluorescence after 60 minutes.

[0146] FIG. 86. Remaining activity of HaloTag[22-297](M2F) mutants after thermal challenge in the presence of excess HaloTag[3-19] synthetic peptide, Set #1. HaloTag[22-297](M2F) mutants were expressed in E. coli lysates and combined with 250 micromolar synthetic HaloTag[3-19] peptide to saturate binding. Reactions were incubated at room temperature for 30 minutes prior to incubation at 40 C for 10 minutes. After returning to room temperature, reactions were labeled with 50 nM JF646 HaloTag ligand and measured for fluorescence after 60 minutes.

[0147] FIG. 87. Remaining activity of HaloTag[22-297](M2F) mutants after thermal challenge in the presence of excess HaloTag[3-19] synthetic peptide, Set #2. HaloTag[22-297](M2F) mutants were expressed in E. coli lysates and combined with 250 micromolar synthetic HaloTag[3-19] peptide to saturate binding. Reactions were incubated at room temperature for 30 minutes prior to incubation at 40 C for 10 minutes. After returning to room temperature, reactions were labeled with 50 nM JF646 HaloTag ligand and measured for fluorescence after 60 minutes.

[0148] FIG. 88. Remaining fold response of HaloTag[22-297](M2F) mutants after thermal challenge in the presence of excess HaloTag[3-19] synthetic peptide, Set #1. HaloTag[22-297](M2F) mutants were expressed in E. coli lysates and combined with 250 micromolar synthetic HaloTag[3-19] peptide to saturate binding. Reactions were incubated at room temperature for 30 minutes prior to incubation at 40 C for 10 minutes. After returning to room temperature, reactions were labeled with 50 nM JF646 HaloTag ligand and measured for fluorescence after 60 minutes.

[0149] FIG. 89. Remaining fold response of HaloTag[22-297](M2F) mutants after thermal challenge in the presence of excess HaloTag[3-19] synthetic peptide, Set #2. HaloTag[22-297](M2F) mutants were expressed in E. coli lysates and combined with 250 micromolar synthetic HaloTag[3-19] peptide to saturate binding. Reactions were incubated at room temperature for 30 minutes prior to incubation at 40 C for 10 minutes. After returning to room temperature, reactions were labeled with 50 nM JF646 HaloTag ligand and measured for fluorescence after 60 minutes.

[0150] FIG. 90. The activity of different small HaloTag fragments in live mammalian cells. HeLa cells transiently transfected with plasmids expressing the large HaloTag fragment fused to FRB and small HaloTag fragments fused to FKBP were incubated for 2 hours with 500 nM Rapamycin, followed by labeling with 50 nM JF646 HaloTag ligand prior to detection of fluorescence activity at indicated time points. Fluorescence intensity of JF646 HaloTag ligand in live cell assays over time comparing cells treated or untreated with Rapamycin.

[0151] FIG. 91. Fold response of different small HaloTag fragments in live mammalian cells. HeLa cells transiently transfected with plasmids expressing the large HaloTag fragment fused to FRB and small HaloTag fragments fused to FKBP were incubated for 2 hours with 500 nM Rapamycin, followed by labeling with 50 nM JF646 HaloTag ligand prior to detection of fluorescence activity at indicated time points. The fold response of each assay condition was calculated as the ratio of fluorescence signal for +Rapamycin/−Rapamycin treated cells.

[0152] FIG. 92. Complementation of split HaloTag fragments by gel analysis. 50 ul of HeLa cell lysate that had been transiently transfected with plasmids expressing the large HaloTag fragment fused to FRB and small HaloTag fragments fused to FKBP were incubated with 25 ul rapamycin at room temperature for 2 hours to induce HaloTag fragments complementation. The final concentration of rapamycin in each well is 500 nM). Then 10 ul of diluted TMR solution was added to all wells and incubated at room temperature in the dark overnight prior to resolution by SDS-PAGE and fluorescence detection. The final concentration of TMR in each well is 2 micromolar.

[0153] FIG. 93. Activity comparison of HaloTag[22-297] variants in a protein complementation assay in live mammalian cells. HeLa cells transiently transfected with plasmids expressing the large HaloTag fragment fused to FRB and small HaloTag fragments fused to FKBP were incubated for 2 hours with 500 nM Rapamycin, followed by labeling with 50 nM JF646 HaloTag ligand prior to detection of fluorescence activity at indicated time points. Fluorescence intensity of JF646 HaloTag ligand in live cell assays over time comparing cells treated or untreated with Rapamycin.

[0154] FIG. 94. Fold response comparison of HaloTag[22-297] variants in a protein complementation assay in live mammalian cells. HeLa cells transiently transfected with plasmids expressing the large HaloTag fragment fused to FRB and small HaloTag fragments fused to FKBP were incubated for 2 hours with 500 nM Rapamycin, followed by labeling with 50 nM JF646 HaloTag ligand prior to detection of fluorescence activity at indicated time points. The fold response of each assay condition was calculated as the ratio of fluorescence signal for +Rapamycin/− Rapamycin treated cells.

[0155] FIG. 95. Live cell imaging of split HaloTag function in mammalian cells. HeLa cells transiently transfected with plasmids expressing FKBP-HaloTag[1-30] and HaloTag[23-297]-FRB were incubated overnight with 1 micromolar Rapamycin. Prior to imaging by confocal microscopy, cells were labeled with 100 nM JF646 HaloTag ligand and nuclei stained with DAPI. Image data were collected in the Far-red channel (Ex. 637 nm, left) and blue/Far-red/DIC merged channel (Ex. 408 nm, right).

[0156] FIG. 96. Quantitation of differences between split HaloTag and HaloTag7 in live cell imaging of mammalian cells. HeLa cells transiently transfected with plasmids expressing FKBP-HaloTag[1-30] and HaloTag[23-297]-FRB were incubated overnight with 1 micromolar Rapamycin. Prior to imaging by confocal microscopy, cells were labeled with 100 nM JF646 HaloTag ligand and nuclei stained with DAPI. Comparison of quantitated far-red channel fluorescence intensity for cells expressing split HaloTag fragments versus HT-7.

[0157] FIG. 97. Live cell imaging of split HaloTag function in mammalian cells (second series of field of views). HeLa cells transiently transfected with plasmids expressing FKBP-HaloTagT[1-30] and HaloTagT[23-297]-FRB were incubated overnight with 1 micromolar Rapamycin. Prior to imaging by confocal microscopy, cells were labeled with 100 nM JF646 HaloTag ligand and nuclei stained with DAPI. Image data were collected in the Far-red channel (Ex. 637 nm, left) and blue/Far-red/DIC merged channel (Ex. 408 nm, right).

[0158] FIG. 98. Live cell imaging of split HaloTag function in mammalian cells (second series of field of views). HeLa cells transiently transfected with plasmids expressing FKBP-HaloTag[1-30] and HaloTag[23-297]-FRB were incubated overnight with 1 micromolar Rapamycin. Prior to imaging by confocal microscopy, cells were labeled with 100 nM JF646 HaloTag ligand and nuclei stained with DAPI. Comparison of quantitated far-red channel fluorescence intensity for cells expressing split HaloTag fragments versus HT-7.

[0159] FIG. 99. Live cell imaging of split HaloTag complementation activity in mammalian cells. HeLa cells transiently transfected with plasmids expressing EGFP-FKBP-HaloTag[1-30] and HaloTag[23-297]-FRB were incubated overnight with 1 micromolar Rapamycin. Prior to imaging by confocal microscopy, cells were labeled with 100 nM JF646 HaloTag ligand. The Imaging data were collected in the Far-red channel (Ex. 637 nm, left) and the green channel (Ex. 488 nm, right). *FOV: Field of view.

[0160] FIG. 100. Quantitation of differences in fluorescence intensities in live cell imaging of split HaloTag complementation activity in mammalian cells. HeLa cells transiently transfected with plasmids expressing EGFP-FKBP-HaloTagT[1-30] and HaloTagT[23-297]-FRB were incubated overnight with 1 micromolar Rapamycin. Prior to imaging by confocal microscopy, cells were labeled with 100 nM JF646 HaloTag ligand. Comparison of the fluorescence intensity of Split HT vs. EGFP in far-red and green channels, respectively. *FOV: Field of view.

[0161] FIG. 101. Live cell imaging of non-complemented split HaloTag activity in mammalian cells. HeLa cells transiently transfected with plasmids expressing EGFP-FKBP-HaloTag[1-30] and HaloTag[23-297]-FRB in the absence of Rapamycin. Prior to imaging by confocal microscopy, cells were labeled with 100 nM JF646 HaloTag ligand. The Imaging data were collected in the Far-red channel (Ex. 637 nm, left) and the green channel (Ex. 488 nm, right). *FOV: Field of view.

[0162] FIG. 102. Quantitation of live cell imaging of non-complemented split HaloTag activity in mammalian cells. HeLa cells transiently transfected with plasmids expressing EGFP-FKBP-HaloTag[1-30] and HaloTag[23-297]-FRB were not incubated Rapamycin. Prior to imaging by confocal microscopy, cells were labeled with 100 nM JF646 HaloTag ligand. Comparison of the fluorescence intensity of non-complemented Split HT vs. EGFP in far-red and green channels, respectively. *FOV: Field of view.

[0163] FIG. 103. Comparison of the activity of split HaloTag fragment variant combinations in live mammalian cells using a model interaction system. HeLa cells transiently transfected with plasmids expressing the large HaloTag fragments fused to FRB and small HaloTag fragments fused to FKBP were incubated with 1 micromolar Rapamycin overnight at 37° C. The next day, the cells were labeled with 100 nM JF646 HaloTag ligand before detecting fluorescence activity at indicated time points. Fluorescence intensity of JF646 HaloTag ligand in live cell assays over time comparing cells treated or untreated with Rapamycin.

[0164] FIG. 104. Comparison of the fold response of split HaloTag fragment variant combinations in live mammalian cells using a model interaction system. HeLa cells transiently transfected with plasmids expressing the large HaloTag fragments fused to FRB and small HaloTag fragments fused to FKBP were incubated with 1 micromolar Rapamycin overnight at 37° C. The next day, the cells were labeled with 100 nM JF646 HaloTag ligand before detecting fluorescence activity at indicated time points. The fold response of each assay condition was calculated as the ratio of fluorescence signal for +Rapamycin/− Rapamycin treated cells.

[0165] FIG. 105. Live cell imaging of split HaloTag activity in mammalian cells using a model protein interaction system showing dependence on interaction facilitation for labeling. HeLa cells transiently transfected with plasmids expressing both EGFP-FKBP-HaloTag[3-19] and HaloTag[22-297](Q145H+P154R)-FRB were imaged in +/−Rapamycin conditions; in +Rapamycin condition cells were incubated with 1 micromolar Rapamycin overnight at 37° C. Prior to imaging by confocal microscopy, cells were labeled with 100 nM JF646 HaloTag ligand for 30 minutes at 37° C. The Imaging data were collected in the Far-red channel (Ex. 637 nm, left) and the green channel (Ex. 488 nm, right).

[0166] FIG. 106. Quantitation of live cell imaging of split HaloTag activity in mammalian cells using a model protein interaction system. HeLa cells transiently transfected with plasmids expressing both EGFP-FKBP-HaloTag[3-19] and HaloTag[22-297](Q145H+P154R)-FRB were imaged in +/−Rapamycin conditions; in +Rapamycin condition cells were incubated with 1 micromolar Rapamycin overnight at 37° C. Prior to imaging by confocal microscopy, cells were labeled with 100 nM JF646 HaloTag ligand for 30 minutes at 37° C. Comparison of the fluorescence intensity of non-complemented vs. complemented split HaloTag in +/−RAP conditions in the far-red channel, respectively.

[0167] FIG. 107. Live cell imaging of split HaloTag activity in mammalian cells using a model protein interaction system showing dependence on interaction facilitation for labeling. HeLa cells transiently transfected with plasmids expressing both EGFP-FKBP-HaloTag[3-19] and HaloTag[22-297](M2F)-FRB were imaged in +/−Rapamycin conditions; in +Rapamycin condition cells were incubated with 1 micromolar Rapamycin overnight at 37° C. Prior to imaging by confocal microscopy, cells were labeled with 100 nM JF646 HaloTag ligand for 30 minutes at 37° C. The Imaging data were collected in the Far-red channel (Ex. 637 nm, left) and the green channel (Ex. 488 nm, right).

[0168] FIG. 108. Quantitation of live cell imaging of split HaloTag activity in mammalian cells using a model protein interaction system. HeLa cells transiently transfected with plasmids expressing both EGFP-FKBP-HaloTag[3-19] and HaloTag[22-297](M2F)-FRB were imaged in +/−Rapamycin conditions; in +Rapamycin condition cells were incubated with 1 micromolar Rapamycin overnight at 37° C. Prior to imaging by confocal microscopy, cells were labeled with 100 nM JF646 HaloTag ligand for 30 minutes at Comparison of the fluorescence intensity of non-complemented vs. complemented split HaloTag in +/−RAP conditions in the far-red channel, respectively.

[0169] FIG. 109. Comparison of the fluorescent intensity of all imaged cells in serval fields of view in +/−RAP conditions. Each dot represents the intensity of an imaged cell as quantitated using CellProfiler software. The horizontal line is indicative of the median of the data.

[0170] FIG. 110. Live cell imaging of split HaloTag activity in mammalian cells using JF585 HaloTag ligand in the presence of facilitated interaction between split HaloTag fragments. HeLa cells transiently transfected with plasmids expressing both EGFP-FKBP-HaloTag[3-19]-3NLS and HaloTag[22-297](Q145H+P154R)-FRB-3NLS were imaged in +Rapamycin condition; in +Rapamycin condition cells were incubated with 1 micromolar Rapamycin overnight at 37° C. Prior to imaging by confocal microscopy, cells were labeled with 100 nM JF585 HaloTag ligand for 30 minutes at 37° C. The Imaging data were collected in the red channel (Ex. 561 nm, left) and the green channel (Ex. 488 nm, right). * NLS: Nuclear Localization Signals.

[0171] FIG. 111. Live cell imaging of split HaloTag activity in mammalian cells using JF585 HaloTag ligand in the absence of facilitated interaction between split HaloTag fragments. HeLa cells transiently transfected with both EGFP-FKBP-HaloTag[3-19]-3NLS and HaloTag[22-297](Q145H+P154R)-FRB-3NLS were imaged without the addition of Rapamycin. Prior to imaging by confocal microscopy, cells were labeled with 100 nM JF585 HaloTag ligand for 30 minutes at 37° C. The Imaging data were collected in the red channel (Ex. 561 nm, left) and the green channel (Ex. 488 nm, right). * NLS: Nuclear Localization Signals.

[0172] FIG. 112. Live cell imaging of split HaloTag activity in mammalian cells using JF635 HaloTag ligand in the presence of facilitated interaction between split HaloTag fragments. HeLa cells transiently transfected with plasmids expressing both EGFP-FKBP-HaloTag[3-19]-3NLS and HaloTag[22-297](Q145H+P154R)-FRB-3NLS were imaged in +Rapamycin condition; in +Rapamycin condition cells were incubated with 1 micromolar Rapamycin overnight at 37° C. Prior to imaging by confocal microscopy, cells were labeled with 100 nM JF635 HaloTag ligand for 30 minutes at 37° C. The Imaging data were collected in the far-red channel (Ex. 637 nm, left) and the green channel (Ex. 488 nm, right). * NLS: Nuclear Localization Signals.

[0173] FIG. 113. Live cell imaging of split HaloTag activity in mammalian cells using JF635 HaloTag ligand in the absence of facilitated interaction between split HaloTag fragments. HeLa cells transiently transfected with plasmids expressing both EGFP-FKBP-HaloTag[3-19]-3NLS and HaloTag[22-297](Q145H+P154R)-FRB-3NLS were imaged in −Rapamycin condition. Prior to imaging by confocal microscopy, cells were labeled with 100 nM JF635 HaloTag ligand for 30 minutes at 37° C. The Imaging data were collected in the far-red channel (Ex. 637 nm, left) and the green channel (Ex. 488 nm, right). * NLS: Nuclear Localization Signals.

[0174] FIG. 114. Comparison of the fluorescent intensity of all imaged cells in serval fields of view in +/−RAP conditions with fluorogenic ligand JF585 and JF635. Each dot represents the intensity of an imaged cell. CellProfiler software is used for this analysis. The horizontal line is indicative of the median of the data.

[0175] FIG. 115. Live cell imaging of split HaloTag activity in mammalian cells. HeLa cells transiently transfected with plasmids expressing both EGFP-FKBP-HaloTag[3-19] and HaloTag[22-297](Q145H+P154R)-FRB were imaged in +Rapamycin condition, 1 micromolar Rapamycin overnight incubation at 37° C. Prior to imaging by confocal microscopy, cells were labeled with 100 nM JF646 HaloTag ligand for 30 minutes at 37° C. The Imaging data were collected in the Far-red channel (Ex. 637 nm, bottom) and the green channel (Ex. 488 nm, top).

[0176] FIG. 116. Live cell imaging of split HaloTag activity in mammalian cells. HeLa cells transiently transfected with plasmids expressing both EGFP-FKBP-HaloTag[3-19] and HaloTag[22-297](Q145H+P154R)-FRB were imaged in and −Rapamycin condition. Prior to imaging by confocal microscopy, cells were labeled with 100 nM JF646 HaloTag ligand for 30 minutes at 37° C. The Imaging data were collected in the Far-red channel (Ex. 637 nm, bottom) and the green channel (Ex. 488 nm, top).

[0177] FIG. 117. Live cell imaging of split HaloTag activity in mammalian cells. To measure the background originating from labeling the Large HaloTag fragment, HaloTag[22-297](Q145H+P154R), cells were transfected with just the HaloTag[22-297](Q145H+P154R)-FRB plasmid and imaged in the green channel and the far-red channel. Prior to imaging by confocal microscopy, cells were labeled with 100 nM JF646 HaloTag ligand for 30 minutes at 37° C. The Imaging data were collected in the Far-red channel (Ex. 637 nm, bottom) and the green channel (Ex. 488 nm, top).

[0178] FIG. 118. Live cell imaging of split HaloTag activity in mammalian cells. Comparison of the fluorescent intensity of all imaged cells in serval fields of view in +/−rapamycin conditions plus the fluorescent intensity of the labeled non-complemented Large HaloTag fragment. Each dot represents the intensity of an imaged cell. CellProfiler software is used for this analysis. The horizontal line is indicative of the median of the data.

[0179] FIG. 119. Live cell imaging of split HaloTag activity in mammalian cells. HeLa cells transiently transfected with plasmids expressing both EGFP-FKBP-HaloTag[3-19] and HaloTag[22-297](M2F)-FRB were imaged in +Rapamycin condition, 1 micromolar Rapamycin overnight incubation at 37° C. Prior to imaging by confocal microscopy, cells were labeled with 100 nM JF646 HaloTag ligand for 30 minutes at 37° C. The Imaging data were collected in the Far-red channel (Ex. 637 nm, bottom) and the green channel (Ex. 488 nm, top).

[0180] FIG. 120. Live cell imaging of split HaloTag activity in mammalian cells. HeLa cells transiently transfected with plasmids expressing both EGFP-FKBP-HaloTag[3-19] and HaloTag[22-297](M2F)-FRB were imaged in and −Rapamycin condition. Prior to imaging by confocal microscopy, cells were labeled with 100 nM JF646 HaloTag ligand for 30 minutes at 37° C. The Imaging data were collected in the Far-red channel (Ex. 637 nm, bottom) and the green channel (Ex. 488 nm, top).

[0181] FIG. 121. Live cell imaging of split HaloTag activity in mammalian cells. To measure the background originating from labeling the Large HaloTag fragment, HaloTag[22-297](M2F), cells were transfected with just the HaloTag[22-297](M2F)-FRB plasmid and imaged in the green channel and the far-red channel. Prior to imaging by confocal microscopy, cells were labeled with 100 nM JF646 HaloTag ligand for 30 minutes at 37° C. The Imaging data were collected in the Far-red channel (Ex. 637 nm, bottom) and the green channel (Ex. 488 nm, top).

[0182] FIG. 122. Time-lapse live cell imaging of split HaloTag complementation and labeling upon the addition of Rapamycin and JF646 in live mammalian cells. HeLa cells transiently transfected with plasmids expressing both EGFP-FKBP-HaloTag[3-19] and HaloTag[22-297](M2F)-FRB were imaged 48 hours post-transfection. The cells were treated with a mixture of 1 micromolar Rapamycin plus 100 nM JF646 and immediately imaged every 15 minutes for 12 hours. The top row of images shows the detection of JF646 HaloTag ligand fluorescence in the far-red channel (Ex. 637 nm), and the bottom row shows the detection of EGFP signal in the green channel (Ex. 488 nm).

[0183] FIG. 123. Quantitation of time-lapse live cell imaging of complemented split HaloTag labeling upon the addition of JF646 HaloTag ligand to live mammalian cells. The average of all cell intensities present in the captured fields of view were tracked in the far-red channel over this period.

[0184] FIG. 124. Comparing the expression of HaloTag[22-297](Q145H+P154R) and HaloTag[22-297](M2F) when complemented with the small HaloTag fragment in mammalian cells. 50 ul of HeLa cells lysate that was transiently transfected with plasmids expressing EGFP-FKBP-HaloTag[3-19], HaloTag[22-297](Q145H+P154R)-FRB or HaloTag[22-297](M2F)-FRB plasmids and were incubated with 500 nM Rapamycin at room temperature for 2 hours to induce HaloTag fragments complementation. TMR HaloTag ligand at 2 micromolar was added to all wells and incubated at room temperature in the dark overnight prior to resolution by SDS-PAGE and fluorescence detection.

[0185] FIG. 125. Use of split HaloTag in detecting the interaction between BRD4 and Histone H3.3 in live mammalian cells. HeLa cells transiently transfected with plasmids expressing HaloTag[22-297](M2F) fused to Histone (H3.3) and EGFP in different orientations, and HaloTag[3-19] fused to C or N-terminus of the BRD4 protein were incubated at 37° C. for 48 hours post transfection. Then, the cells were labeled with 100 nM JF646 HaloTag ligand before detection of fluorescence activity at indicated time points.

[0186] FIG. 126. Reversibility measured with split HaloTag of the BRD4:Histone H3.3 interaction in live mammalian cells. HeLa cells transiently transfected with plasmids expressing HaloTag[22-297](M2F), Histone (H3.3), and EGFP in different orientations, and HaloTag[3-19] fused to the C- or N-terminus of BRD4 were incubated at 37° C. for 48 hours post transfection. Cells were incubated with 20 micromolar JQ1, an inhibitor of the interaction, for 24 hours. Cells were labeled with 100 nM JF646 HaloTag ligand before detecting fluorescence activity at indicated time points. For each construct, four technical replicates were tested. The bar for each construct is the mean of the four replicates, and the error bar represents the standard deviation.

[0187] FIG. 127. Fold response to inhibitor measured with split HaloTag of the BRD4:Histone H3.3 interaction in live mammalian cells. HeLa cells transiently transfected with plasmids expressing HaloTag[22-297](M2F), Histone (H3.3), and EGFP in different orientations, and HaloTag[3-19] fused to the C- or N-terminus of BRD4 were incubated at 37° C. for 48 hours post transfection. Cells were incubated with 20 micromolar JQ1, an inhibitor of the interaction, for 24 hours. Cells were labeled with 100 nM JF646 HaloTag ligand before detecting fluorescence activity at indicated time points. The fold response for each construct was calculated as the ratio of the fluorescence signal for −JQ1/+JQ1 treated cells. For each construct, four technical replicates have been tested. The bar for each construct is the Mean of the four replicates, and the error bar represents the standard deviation.

[0188] FIG. 128. Live cell imaging of split HaloTag detection of the BRD4:Histone H3 interaction in live mammalian cells. HeLa cells transiently transfected with plasmids expressing both BRD4-HaloTag[3-19] and H3.3-HaloTag[22-297](M2F)-EGFP were imaged without the BRD4 inhibitor (JQ1). Prior to imaging by confocal microscopy, cells were labeled with 100 nM JF646 HaloTag ligand for 30 minutes at 37° C. The Imaging data were collected in the far-red channel (Ex. 637 nm) and the green channel (Ex. 488 nm).

[0189] FIG. 129. Live cell imaging of split HaloTag detection of inhibition of the BRD4:Histone H3 interaction in live mammalian cells. HeLa cells transiently transfected with plasmids expressing both BRD4-HaloTag[3-19] and H3.3-HaloTag[22-297](M2F)-EGFP were imaged after treatment with 20 micromolar JQ1 inhibitor overnight at 37° C. Prior to imaging by confocal microscopy, cells were labeled with 100 nM JF646 HaloTag ligand for 30 minutes at 37° C. The imaging data were collected in the far-red channel (Ex. 637 nm) and the green channel (Ex. 488 nm). * DIC: Differential Interference Contrast.

[0190] FIG. 130. Background measurement of HaloTag[22-297](M2F) fused to Histone H3 in live mammalian cells. To measure the background originating from labeling the HaloTag[22-297](M2F) fragment, cells were transfected with just the H3.3-HaloTag[22-297](M2F)-EGFP plasmid and imaged using the same microscope settings. Prior to imaging by confocal microscopy, cells were labeled with 100 nM JF646 HaloTag ligand for 30 minutes at 37° C. The imaging data were collected in the far-red channel (Ex. 637 nm) and the green channel (Ex. 488 nm).

[0191] FIG. 131. Quantitation of live cell imaging of the BRD4:Histone H3 interaction in live mammalian cells using split HaloTag. Comparison of the fluorescent intensity of all imaged cells across several fields of view in the presence or absence of 20 micromolar JQ1 inhibitor and controls labeling the cells expressing the HaloTag[2-297](M2F) fragment alone. Each dot represents the intensity of an imaged cell. CellProfiler software is used for analysis. The horizontal line in each set indicates the median of the data.

[0192] FIG. 132. A second independent live cell imaging experiment of split HaloTag detection of the BRD4:Histone H3 interaction in live mammalian cells. HeLa cells transiently transfected with plasmids expressing both BRD4-HaloTag[3-19] and H3.3-HaloTag[22-297](M2F)-EGFP were imaged without the BRD4 inhibitor (JQ1). Prior to imaging by confocal microscopy, cells were labeled with 100 nM JF646 HaloTag ligand for 30 minutes at 37° C. The Imaging data were collected in the far-red channel (Ex. 637 nm) and the green channel (Ex. 488 nm).

[0193] FIG. 133 Live cell imaging of split HaloTag detection of inhibition of the BRD4:Histone H3 interaction in live mammalian cells at lower inhibitor concentration. HeLa cells transiently transfected with plasmids expressing both BRD4-HaloTag[3-19] and H3.3-HaloTag[22-297](M2F)-EGFP were imaged after treatment with 20 micromolar JQ1 inhibitor overnight at 37° C. Prior to imaging by confocal microscopy, cells were labeled with 100 nM JF646 HaloTag ligand for 30 minutes at 37° C. The imaging data were collected in the far-red channel (Ex. 637 nm) and the green channel (Ex. 488 nm). * DIC: Differential Interference Contrast.

[0194] FIG. 134. Background measurement of HaloTag[22-297](M2F) fused to Histone H3 in live mammalian cells at lower laser intensity. To measure the background originating from labeling the HaloTag [22-297](M2F) fragment, cells were transfected with just the H3.3-HaloTag[22-297](M2F)-EGFP plasmid and imaged using the same microscope settings but lower gain intensity compared to the first set of imaging experiments. Prior to imaging by confocal microscopy, cells were labeled with 100 nM JF646 HaloTag ligand for 30 minutes at 37° C. The imaging data were collected in the far-red channel (Ex. 637 nm) and the green channel (Ex. 488 nm).

[0195] FIG. 135. Quantitation of live cell imaging of split HaloTag function in detecting the BRD4 and Histone proteins interaction in live mammalian cells. Comparison of the fluorescent intensity of all imaged cells in serval fields of view in +/−JQ1, 10 micromolar, conditions plus the fluorescent intensity of the labeled non-complemented Large HaloTag fragment. Each dot represents the intensity of an imaged cell. CellProfiler software is used for this analysis. The horizontal line is indicative of the median of the data.

[0196] FIG. 136. Timepoint imaging of complemented BRD4:Histone H3 complexes in live cells after addition of JF646 HaloTag ligand. HeLa cells transiently transfected with plasmids expressing BRD4-HaloTag[3-19] and H3.3-HaloTag[22-297](M2F)-EGFP imaged 48 hours post-transfection. Cells were immediately imaged after the ligand, 100 nM JF646, addition every 15 minutes for 1.5 hour. Imaging data were collected in the Far-red channel (Ex. 637 nm, top panel) and the green channel (Ex. 488 nm, bottom panel). Data is shown for the Far-red channel to demonstrate labeling changes over time with the JF646 HaloTag ligand.

[0197] FIG. 137. Quantitation of live cell labeling kinetics of split HaloTag fragments fused to BRD4 and Histone H3 using time-lapse imaging. Cells were immediately imaged after the ligand addition every 10 minutes for 70 minutes. A Z-stack image was obtained at all time points to ensure all cells were captured in focus. The most focused Z levels were merged into one, and the intensity of all cells (6 total objects) was measured and averaged at all time points. The average of all cells' intensities present in the captured field of view were tracked in the far-red channel and the green channel over this period.

[0198] FIG. 138. Live cell time-lapse imaging of split HaloTag activity as the BRD4 and Histone and so the small HaloTag and Large dissociates upon the addition of BRD4 inhibitor, JQ1. HeLa cells transiently transfected with plasmids expressing both BRD4-HaloTag[3-19] and H3.3-HaloTag[22-297](M2F)-EGFP has imaged 48 hours post-transfection while being labeled with 100 nM JF646 (30 minutes incubation with JF646 before imaging). Then, the cells were treated with 20 micromolar of the BRD4 inhibitor, JQ1, and imaged every 15 minutes immediately after adding JQ1 for 12 hours.

[0199] FIG. 139. Quantitation of single live cell time-lapse imaging of inhibition of the BRD4:Histone H3 interaction using split HaloTag fluorescence. HeLa cells transiently transfected with plasmids expressing both BRD4-HaloTag[3-19] and H3.3-HaloTag[22-297](M2F)-EGFP has imaged 48 hours post-transfection while being labeled with 100 nM JF646 (30 minutes incubation with JF646 before imaging). Then, the cells were treated with 20 micromolar of the BRD4 inhibitor, JQ1, and imaged every 15 minutes immediately after adding JQ1 for 12 hours. The intensity of a single cell in both the green and the far-red channel plus its occupied area was tracked over this period.

[0200] FIG. 140. Use of split HaloTag in detecting the interaction between Calmodulin and M13 peptide induced by the Calcium ions in live mammalian cells. HeLa cells transiently transfected with plasmids expressing M13-HaloTag[22-297](M2F)-EGFP and HaloTag[3-19]-CaM plasmids were incubated at 37° C. for 48 hours post-transfection. Cells were treated with a mixture of different concentrations of Calcium chloride and 100 nM JF646. The fluorescence activity was measured at indicated time points. For each construct, four technical replicates were tested. The bar for each construct is the mean of the four replicates, and the error bar represents the standard deviations.

[0201] FIG. 141. The fold response of split HaloTag in detecting the interaction between Calmodulin and M13 peptide induced by the Calcium ions in live mammalian cells. The fold response of each assay condition was calculated as the ratio of fluorescence signal for +Calcium chloride divided by −Calcium chloride treated cells (B). For each construct, four technical replicates have been tested. The bar for each construct is the mean of the four replicates, and the error bar represents the standard deviations.

[0202] FIG. 142. Live cell imaging of split HaloTag function in detecting the interaction between Calmodulin protein with the M13 peptide induced upon the addition of Ca ions in live mammalian cells. HeLa cells transiently transfected with plasmids expressing both with M13-HaloTag[22-297](M2F)-EGFP and HaloTag[3-19]-CaM were imaged in in the presence or absence of 6 mM Calcium chloride conditions 30 minutes after addition at 37° C. Prior to imaging by confocal microscopy, cells were labeled with 100 nM JF646 HaloTag ligand for 30 minutes at 37° C. The imaging data were collected in the far-red channel (Ex. 637 nm) and the green channel (Ex. 488 nm).

[0203] FIG. 143. Background measurement of HaloTag[22-297](M2F) fused to M13 peptide in live mammalian cells at lower laser intensity To measure the background originating from labeling the HaloTag [22-297](M2F) fragment, cells were transfected with just the M13-HaloTag[22-297](M2F)-EGFP plasmid and imaged using the same microscope settings. The Imaging data were collected in the far-red channel (Ex. 637 nm) and the green channel (Ex. 488 nm).

[0204] FIG. 144. Quantitation of live cell imaging of split HaloTag function in detecting the Calmodulin and M13 peptide interaction in live mammalian cells. Comparison of the fluorescent intensity of all imaged cells across several fields of view in the presence or absence of Calcium chloride (6 mM) conditions compared against the background fluorescent intensity of the labeled non-complemented HaloTag[22-297](M2F) fragment alone. Each dot represents the intensity of an imaged cell. CellProfiler software is used for this analysis. The horizontal line is indicative of the median of the data.

[0205] FIG. 145. Use of split HaloTag to detect the interaction between the E3 ligase CRBN and target protein BRD4 upon the addition of the dBET6 PROTAC ligand in live mammalian cells. HeLa cells transiently transfected with plasmids expressing HaloTag[22-297](Q145H+P154R)-EGFP and HaloTag[3-19]-BRD4 plasmids were incubated at 37° C. for 48 hours post-transfection. Cells were treated with a mixture of different concentrations of the PROTAC ligand (dBET6), and +/−10 micromolar MG-132, a proteasome inhibitor, and incubated at 37° C. for two hours. Then, 100 nM JF646 was added to cells, and the fluorescence activity was measured at indicated time points.

[0206] FIG. 146. Live cell imaging using split HaloTag to detect ternary complex formation of E3 ligase VHL and target protein BRD4 upon the addition of the MZ1 PROTAC in live mammalian cells. HeLa cells transiently transfected with plasmids expressing both HaloTag[22-297](Q145H+P154R)-VHL-EGFP and HaloTag[3-19]-BRD4 plasmids were imaged after MZ1 addition; cells were incubated with 2 micromolar PROTAC ligand for 2 hours at 37° C. Prior to imaging by confocal microscopy, cells were labeled with 100 nM JF646 HaloTag ligand for 30 minutes at 37° C. For all imaging experiments, the cells were incubated with 10 micromolar MG-132, a proteasome inhibitor, for 2 hours at 37° C. to prevent the possibility of the formed PROTAC ternary complex degradation. The imaging data were collected in the far-red channel (Ex. 637 nm) and the green channel (Ex. 488 nm).

[0207] FIG. 147. Background levels of live cell imaging using split HaloTag to detect ternary complex formation of E3 ligase VHL and target protein BRD4 in the absence of the MZ1 PROTAC in live mammalian cells. HeLa cells transiently transfected with plasmids expressing both HaloTag[22-297](Q145H+P154R)-VHL-EGFP and HaloTag[3-19]-BRD4 plasmids were imaged in the absence of MZ1 addition. Prior to imaging by confocal microscopy, cells were labeled with 100 nM JF646 HaloTag ligand for 30 minutes at 37° C. For all imaging experiments, the cells were incubated with 10 micromolar MG-132, a proteasome inhibitor, for 2 hours at 37° C. to prevent the possibility of the formed PROTAC ternary complex degradation. The imaging data were collected in the far-red channel (Ex. 637 nm) and the green channel (Ex. 488 nm).

[0208] FIG. 148. Background levels of live cell imaging using split HaloTag to detect ternary complex formation of E3 ligase VHL and target protein BRD4 in the absence of the HaloTag[3-19] fragment in live mammalian cells. To measure the background originating from labeling the HaloTag[22-297](Q145H+P154R) fragment, cells were transfected with just the HaloTag[22-297](Q145H+P154R)-VHL-EGFP plasmid and imaged using the same microscope settings. Prior to imaging by confocal microscopy, cells were labeled with 100 nM JF646 HaloTag ligand for 30 minutes at 37° C. For all imaging experiments, the cells were incubated with 10 micromolar MG-132, a proteasome inhibitor, for 2 hours at 37° C. to prevent the possibility of the formed PROTAC ternary complex degradation. The imaging data were collected in the far-red channel (Ex. 637 nm) and the green channel (Ex. 488 nm).

[0209] FIG. 149. Quantitation of live cell imaging using split HaloTag to detect ternary complex formation of E3 ligase VHL and target protein BRD4 in the absence of the MZ1 PROTAC in live mammalian cells. Comparison of the fluorescent intensity of all imaged cells in several fields of view in +/−dBET6 (left) and +/−MZ1 (right), 2 micromolar, conditions plus the fluorescent intensity of the labeled non-complemented large HaloTag fragment. Each dot represents the intensity of an imaged cell. CellProfiler software is used for this analysis. The horizontal line is indicative of the median of the data.

[0210] FIG. 150. Live cell imaging using split HaloTag to detect the interaction between endogenous BRD4 and a transiently expressed Histone H3. HeLa cell line edited with CRISPR to express endogenous BRD4 protein tagged with a dual tag, HaloTag[3-19]-HiBiT, was transiently transfected with a plasmid expressing Histone H3.3-HaloTag[22-297](M2F)-EGFP and imaged 48 hours post-transfection. Prior to imaging by confocal microscopy, cells were labeled with 100 nM JF646 HaloTag ligand for 1 hour at 37° C. The imaging data were collected in the far-red channel (Ex. 637 nm) and the green channel (Ex. 488 nm).

[0211] FIG. 151. Background levels of live cell imaging using split HaloTag when only when transiently expressing HaloTag[22-297](M2F) fused to Histone H3. To measure the background originating from labeling of transiently expressed HaloTag[22-297](M2F) in the absence of the HaloTag[3-19] fragment, cells were transfected with just the H3.3-HaloTag[22-297](M2F)-EGFP plasmid and imaged using the same microscope setting. Prior to imaging by confocal microscopy, cells were labeled with 100 nM JF646 HaloTag ligand for 1 hour at 37° C. The imaging data were collected in the far-red channel (Ex. 637 nm) and the green channel (Ex. 488 nm).

[0212] FIG. 152. Live cell imaging using split HaloTag to detect the interaction between endogenous BRD4 and a transiently expressed VHL E3 ligase in a ternary complex formed with MZ1 PROTAC ligand. HeLa cell line edited with CRISPR to express endogenous BRD4 protein tagged with a dual tag, HaloTag[3-19]-HiBiT, was transiently transfected with a plasmid expressing HaloTag[22-297](Q145H+P154R)-VHL-EGFP. Cells were incubated with 2 micromolar MZ1 PROTAC ligand for 2 hours at 37° C. and then imaged at 48 hours post-transfection. Prior to imaging by confocal microscopy, cells were labeled with 100 nM JF646 HaloTag ligand for 1 hour at 37° C. The imaging data were collected in the far-red channel (Ex. 637 nm) and the green channel (Ex. 488 nm).

[0213] FIG. 153. Improved expression of HaloTag[22-297](M2F) following introduction of mutations. HeLa cells transiently transfected with plasmids expressing different mutants of HaloTag[22-297](M2F)-HiBiT were incubated at 37° C. for about 48 hours post-transfection. Bioluminescence signal was measured after cell lysis by addition of LgBiT and luminescent substrate (Furimazine). The bioluminescence activities are normalized to the activity of the unmutated HaloTag[22-297](M2F) control. A no transfection control (NTC) is shown that was measured identically except without introduction of an expression plasmid.

[0214] FIG. 154. Mutations improving performance of split HaloTag in a model protein:protein interaction system. HeLa cells transiently transfected with plasmids expressing different mutants of HaloTag[22-297](M2F) fragment fused to FRB-EGFP and HaloTag[3-19] fused to FKBP were incubated with 1 micromolar Rapamycin overnight at 37° C. at 24 hours post-transfection. The next day, the cells were labeled with 100 nM JF646 HaloTag ligand before detecting fluorescence activity at indicated time points. Non-transfected cell (NTC) control is included for reference.

[0215] FIG. 155. Fold response of mutations improving performance of split HaloTag in a model protein:protein interaction system. HeLa cells transiently transfected with plasmids expressing different mutants of HaloTag[22-297](M2F) fragment fused to FRB-EGFP and HaloTag[3-19] fused to FKBP were incubated with 1 micromolar Rapamycin overnight at 37° C. at 24 hours post-transfection. The next day, the cells were labeled with 100 nM JF646 HaloTag ligand before detecting fluorescence activity at indicated time points. The fold response of each assay condition was calculated as the ratio of fluorescence signal for +Rapamycin/−Rapamycin treated cells. Non-transfected cell (NTC) control is included for reference.

[0216] FIG. 156. Comparison of maximum fluorescence and fold response of mutations improving performance of split HaloTag in a model protein:protein interaction system. HeLa cells transiently transfected with plasmids expressing different mutants of HaloTag[22-297](M2F) fragment fused to FRB-EGFP and HaloTag[3-19] fused to FKBP were incubated with 1 micromolar Rapamycin overnight at 37° C. at 24 hours post-transfection. The next day, the cells were labeled with 100 nM JF646 HaloTag ligand before detecting fluorescence activity at indicated time points. The fold response of each assay condition was calculated as the ratio of fluorescence signal for +Rapamycin/−Rapamycin treated cells. Non-transfected cell (NTC) control is included for reference. This plot shows the comparison of fold responses vs. the total fluorescent activity of each mutant.

### DEFINITIONS

[0217] Although any methods and materials similar or equivalent to those described herein can be used in the practice or testing of embodiments described herein, some preferred methods, compositions, devices, and materials are described herein. However, before the present materials and methods are described, it is to be understood that this invention is not limited to the particular molecules, compositions, methodologies, or protocols herein described, as these may vary in accordance with routine experimentation and optimization. It is also to be understood that the terminology used in the description is for the purpose of describing the particular versions or embodiments only, and is not intended to limit the scope of the embodiments described herein.

[0218] Unless otherwise defined, all technical and scientific terms used herein have the same meaning as commonly understood by one of ordinary skill in the art to which this invention belongs. However, in case of conflict, the present specification, including definitions, will control. Accordingly, in the context of the embodiments described herein, the following definitions apply.

[0219] As used herein and in the appended claims, the singular forms “a,” “an,” and “the” include plural reference unless the context clearly dictates otherwise. Thus, for example, reference to “a polypeptide” is a reference to one or more polypeptides and equivalents thereof known to those skilled in the art, and so forth.

[0220] As used herein, the term “and/or” includes any and all combinations of listed items, including any of the listed items individually. For example, “A, B, and/or C” encompasses A, B, C, AB, AC, BC, and ABC, each of which is to be considered separately described by the statement “A, B, and/or C.”

[0221] As used herein, the term “comprise” and linguistic variations thereof denote the presence of recited feature(s), element(s), method step(s), etc. without the exclusion of the presence of additional feature(s), element(s), method step(s), etc. Conversely, the term “consisting of” and linguistic variations thereof, denotes the presence of recited feature(s), element(s), method step(s), etc. and excludes any unrecited feature(s), element(s), method step(s), etc., except for ordinarily-associated impurities. The phrase “consisting essentially of” denotes the recited feature(s), element(s), method step(s), etc. and any additional feature(s), element(s), method step(s), etc. that do not materially affect the basic nature of the composition, system, or method. Many embodiments herein are described using open “comprising” language. Such embodiments encompass multiple closed “consisting of” and/or “consisting essentially of” embodiments, which may alternatively be claimed or described using such language.

[0222] As used herein, the term “substantially” means that the recited characteristic, parameter, and/or value need not be achieved exactly, but that deviations or variations, including for example, tolerances, measurement error, measurement accuracy limitations and other factors known to skill in the art, may occur in amounts that do not preclude the effect the characteristic was intended to provide. A characteristic or feature that is substantially absent (e.g., substantially non-fluorescent) may be one that is within the noise, beneath background, below the detection capabilities of the assay being used, or a small fraction (e.g., <1%, <0.1%, <0.01%, <0.001%, <0.00001%, <0.000001%, <0.0000001%) of the significant characteristic (e.g., fluorescent intensity of an active fluorophore).

[0223] As used herein, when referring to amino acid sequences or positions within an amino acid sequence, the phrase “corresponding to” refers to the relative position of an amino acid residue or an amino acid segment with the sequence being referred to, not necessarily the specific identity of the amino acids at that position. For example, a “peptide corresponding to positions 36 through 48 of SEQ ID NO: 1” may comprise less than 100% sequence identity with positions 36 through 48 of SEQ ID NO: 1 (e.g., >70% sequence identity), but within the context of the composition or system being described the peptide relates to those positions.

[0224] As used herein, the term “system” refers to multiple components (e.g., devices, compositions, etc.) that find use for a particular purpose. For example, two separate biological molecules, whether present in the same composition or not, may comprise a system if they are useful together for a shared purpose.

[0225] As used herein, the term “complementary” refers to the characteristic of two or more structural elements (e.g., peptide, polypeptide, nucleic acid, small molecule, etc.) of being able to hybridize, dimerize, or otherwise form a complex with each other. For example, a “complementary peptide and polypeptide” are capable of coming together to form a complex. Complementary elements may require assistance (facilitation) to form a complex (e.g., from interaction elements), for example, to place the elements in the proper conformation for complementarity, to place the elements in the proper proximity for complementarity, to co-localize complementary elements, to lower interaction energy for complementary, to overcome insufficient affinity for one another, etc.

[0226] As used herein, the term “complex” refers to an assemblage or aggregate of molecules (e.g., peptides, polypeptides, etc.) in direct and/or indirect contact with one another. In one aspect, “contact,” or more particularly “direct contact,” means two or more molecules are close enough so that attractive noncovalent interactions, such as Van der Waal forces, hydrogen bonding, ionic and hydrophobic interactions, and the like, dominate the interaction of the molecules. In such an aspect, a complex of molecules (e.g., peptides, polypeptides, etc.) is formed under assay conditions such that the complex is thermodynamically favored (e.g., compared to a non-aggregated, or non-complexed, state of its component molecules). As used herein the term “complex,” unless described as otherwise, refers to the assemblage of two or more molecules (e.g., peptides, polypeptides, etc.).

[0227] As used herein, the term “interaction element” refers to a moiety that assists or facilitates the bringing together of two or more structural elements (e.g., peptides, polypeptides, etc.) to form a complex. In some embodiments, a pair of interaction elements (a.k.a. “interaction pair”) is attached to a pair of structural elements (e.g., peptides, polypeptides, etc.), and the attractive interaction between the two interaction elements facilitate formation of a complex of the structural elements. Interaction elements may facilitate formation of a complex by any suitable mechanism (e.g., bringing structural elements into proximity, placing structural elements in proper conformation for stable interaction, reducing activation energy for complex formation, combinations thereof, etc.). An interaction element may be a protein, polypeptide, peptide, small molecule, cofactor, nucleic acid, lipid, carbohydrate, antibody, etc. An interaction pair may be made of two of the same interaction elements (i.e., homopair) or two different interaction elements (i.e., heteropair). In the case of a heteropair, the interaction elements may be the same type of moiety (e.g., polypeptides) or may be two different types of moieties (e.g., polypeptide and small molecule). In some embodiments, in which complex formation by the interaction pair is studied, an interaction pair may be referred to as a “target pair” or a “pair of interest,” and the individual interaction elements are referred to as “target elements” (e.g., “target peptide,” “target polypeptide,” etc.) or “elements of interest” (e.g., “peptide of interest,” “polypeptide or interest,” etc.).

[0228] As used herein, the term “low affinity” describes an intermolecular interaction between two or more entities that is too weak to result in significant complex formation between the entities, except at concentrations substantially higher (e.g., 2-fold, 5-fold, 10-fold, 100-fold, 1000-fold, or more) than physiologic or assay conditions, or with facilitation from the formation of a second complex of attached elements (e.g., interaction elements).

[0229] As used herein, the term “high affinity” describes an intermolecular interaction between two or more (e.g., three) entities that is of sufficient strength to produce detectable complex formation under physiologic or assay conditions, without facilitation from the formation of a second complex of attached elements (e.g., interaction elements).

[0230] As used herein, the term “preexisting protein” refers to an amino acid sequence that was in physical existence prior to a certain event or date. A “peptide that is not a fragment of a preexisting protein” is a short amino acid chain that is not a fragment or sub-sequence of a protein (e.g., synthetic or naturally-occurring) that was in physical existence prior to the design and/or synthesis of the peptide.

[0231] As used herein, the term “fragment” refers to a peptide or polypeptide that results from dissection or “fragmentation” of a larger whole entity (e.g., protein, polypeptide, enzyme, etc.), or a peptide or polypeptide prepared to have the same sequence as such. Therefore, a fragment is a subsequence of the whole entity (e.g., protein, polypeptide, enzyme, etc.) from which it is made and/or designed. A peptide or polypeptide that is not a subsequence of a preexisting whole protein is not a fragment (e.g., not a fragment of a preexisting protein). A peptide or polypeptide that is “not a fragment of a preexisting protein” is an amino acid chain that is not a subsequence of a protein (e.g., natural or synthetic) that was in physical existence prior to design and/or synthesis of the peptide or polypeptide. A fragment of a hydrolase or dehalogenase, as used herein, is a sequence which is less than the full-length sequence, but which alone cannot form a substrate binding site, and/or has substantially reduced or no substrate binding activity but which, in close proximity to a second fragment of a hydrolase or dehalogenase, exhibits substantially increased substrate binding activity. In one embodiment, a fragment of a hydrolase or dehalogenase is at least 5, e.g., at least 10, at least 20, at least 30, at least 40, or at least 50, contiguous residues of a wild-type hydrolase or a mutated hydrolase, or a sequence with at least 70% sequence identity thereto, and may not necessarily include the N-terminal or C-terminal residue or N-terminal or C-terminal sequences of the corresponding full length protein.

[0232] As used herein, the term “subsequence” refers to peptide or polypeptide that has 100% sequence identify with a portion of another, larger peptide, or polypeptide. The subsequence is a perfect sequence match for a portion of the larger amino acid chain.

[0233] The term “amino acid” refers to natural amino acids, unnatural amino acids, and amino acid analogs, all in their D and L stereoisomers, unless otherwise indicated, if their structures allow such stereoisomeric forms.

[0234] The term “proteinogenic amino acids” refers to the 20 amino acids coded for in the human genetic code, and includes alanine (Ala or A), arginine (Arg or R), asparagine (Asn or N), aspartic acid (Asp or D), cysteine (Cys or C), glutamine (Gln or Q), glutamic acid (Glu or E), glycine (Gly or G), histidine (His or H), isoleucine (Ile or I), leucine (Leu or L), Lysine (Lys or K), methionine (Met or M), phenylalanine (Phe or F), proline (Pro or P), serine (Ser or S), threonine (Thr or T), tryptophan (Trp or W), tyrosine (Tyr or Y) and valine (Val or V). Selenocysteine and pyrrolysine may also be considered proteinogenic amino acids

[0235] The term “non-proteinogenic amino acid” refers to an amino acid that is not naturally-encoded or found in the genetic code of any organism, and is not incorporated biosynthetically into proteins during translation. Non-proteinogenic amino acids may be “unnatural amino acids” (amino acids that do not occur in nature) or “naturally-occurring non-proteinogenic amino acids” (e.g., norvaline, ornithine, homocysteine, etc.). Examples of non-proteinogenic amino acids include, but are not limited to, azetidinecarboxylic acid, 2-aminoadipic acid, 3-aminoadipic acid, beta-alanine, naphthylalanine, aminopropionic acid, 2-aminobutyric acid, 4-aminobutyric acid, 6-aminocaproic acid, 2-aminoheptanoic acid, 2-aminoisobutyric acid, 3-aminoisbutyric acid, 2-aminopimelic acid, tertiary-butylglycine, 2,4-diaminoisobutyric acid, desmosine, 2,2′-diaminopimelic acid, 2,3-diaminopropionic acid, N-ethylglycine, N-ethylasparagine, homoproline, hydroxylysine, allo-hydroxylysine, 3-hydroxyproline, 4-hydroxyproline, isodesmosine, allo-isoleucine, N-methylalanine, N-alkylglycine including N-methylglycine, N-methylisoleucine, N-alkylpentylglycine including N-methylpentylglycine. N-methylvaline, naphthylalanine, norvaline, norleucine (“Norleu”), octylglycine, ornithine, pentylglycine, pipecolic acid, thioproline, homolysine, and homoarginine. Non-proteinogenic also include D-amino acid forms of any of the amino acids herein, as well as non-alpha amino acid forms of any of the amino acids herein (beta-amino acids, gamma-amino acids, delta-amino acids, etc.), all of which are in the scope herein and may be included in peptides herein.

[0236] The term “amino acid analog” refers to an amino acid (e.g., natural or unnatural, proteinogenic or non-proteinogenic) where one or more of the C-terminal carboxy group, the N-terminal amino group and side-chain bioactive group has been chemically blocked, reversibly or irreversibly, or otherwise modified to another bioactive group. For example, aspartic acid-(beta-methyl ester) is an amino acid analog of aspartic acid; N-ethylglycine is an amino acid analog of glycine; or alanine carboxamide is an amino acid analog of alanine. Other amino acid analogs include methionine sulfoxide, methionine sulfone, S-(carboxymethyl)-cysteine, S-(carboxymethyl)-cysteine sulfoxide, and S-(carboxymethyl)-cysteine sulfone.

[0237] As used herein, unless otherwise specified, the terms “peptide” and “polypeptide” refer to polymer compounds of two or more amino acids joined through the main chain by peptide amide bonds (—C(O)NH—). The term “peptide” typically refers to short amino acid polymers (e.g., chains having fewer than 30 amino acids), whereas the term “polypeptide” typically refers to longer amino acid polymers (e.g., chains having more than 30 amino acids).

[0238] As used herein, the terms “artificial” or “synthetic” refer to compositions and systems that are not naturally occurring. For example, an artificial or synthetic peptide, peptoid, or nucleic acid is one comprising a non-natural sequence (e.g., a peptide without 100% identity with a naturally-occurring protein or a fragment thereof).

[0239] As used herein in reference to the production of peptides and polypeptides, the term “synthesis” and linguistic variants thereof may refer to chemical peptide synthesis techniques as well as genetic expression of the peptides and polypeptides.

[0240] As used herein, a “conservative” amino acid substitution refers to the substitution of an amino acid in a peptide or polypeptide with another amino acid having similar chemical properties such as size or charge. For purposes of the present disclosure, each of the following eight groups contains amino acids that are conservative substitutions for one another:
[0241] 1) Alanine (A) and Glycine (G);
[0242] 2) Aspartic acid (D) and Glutamic acid (E);
[0243] 3) Asparagine (N) and Glutamine (Q);
[0244] 4) Arginine (R) and Lysine (K);
[0245] 5) Isoleucine (I), Leucine (L), Methionine (M), and Valine (V);
[0246] 6) Phenylalanine (F), Tyrosine (Y), and Tryptophan (W);
[0247] 7) Serine (S) and Threonine (T); and
[0248] 8) Cysteine (C) and Methionine (M).

[0249] Amino acid residues may be divided into classes based on common side chain properties, for example: polar positive (or basic) (e.g., histidine (H), lysine (K), and arginine (R)); polar negative (or acidic) (e.g., aspartic acid (D), glutamic acid (E)); polar neutral (e.g., serine (S), threonine (T), asparagine (N), glutamine (Q)); non-polar aliphatic (e.g., alanine (A), valine (V), leucine (L), isoleucine (I), methionine (M)); non-polar aromatic (e.g., phenylalanine (F), tyrosine (Y), tryptophan (W)); proline and glycine; and cysteine. As used herein, a “semi-conservative” amino acid substitution refers to the substitution of an amino acid in a peptide or polypeptide with another amino acid within the same class.

[0250] In some embodiments, unless otherwise specified, a conservative or semi-conservative amino acid substitution may also encompass non-naturally occurring amino acid residues that have similar chemical properties to the natural residue. These non-natural residues are typically incorporated by chemical peptide synthesis rather than by synthesis in biological systems. These include, but are not limited to, peptidomimetics and other reversed or inverted forms of amino acid moieties. Embodiments herein may, in some embodiments, be limited to natural amino acids, non-natural amino acids, and/or amino acid analogs.

[0251] Non-conservative substitutions may involve the exchange of a member of one class for a member from another class.

[0252] As used herein, the term “sequence identity” refers to the degree two polymer sequences (e.g., peptide, polypeptide, nucleic acid, etc.) have the same sequential composition of monomer subunits. The term “sequence similarity” refers to the degree with which two polymer sequences (e.g., peptide, polypeptide, nucleic acid, etc.) have similar polymer sequences. For example, similar amino acids are those that share the same biophysical characteristics and can be grouped into the families, e.g., acidic (e.g., aspartate, glutamate), basic (e.g., lysine, arginine, histidine), non-polar (e.g., alanine, valine, leucine, isoleucine, proline, phenylalanine, methionine, tryptophan) and uncharged polar (e.g., glycine, asparagine, glutamine, cysteine, serine, threonine, tyrosine). The “percent sequence identity” (or “percent sequence similarity”) is calculated by: (1) comparing two optimally aligned sequences over a window of comparison (e.g., the length of the longer sequence, the length of the shorter sequence, a specified window), (2) determining the number of positions containing identical (or similar) monomers (e.g., same amino acids occurs in both sequences, similar amino acid occurs in both sequences) to yield the number of matched positions, (3) dividing the number of matched positions by the total number of positions in the comparison window (e.g., the length of the longer sequence, the length of the shorter sequence, a specified window), and (4) multiplying the result by 100 to yield the percent sequence identity or percent sequence similarity. For example, if peptides A and B are both 20 amino acids in length and have identical amino acids at all but 1 position, then peptide A and peptide B have 95% sequence identity. If the amino acids at the non-identical position shared the same biophysical characteristics (e.g., both were acidic), then peptide A and peptide B would have 100% sequence similarity. As another example, if peptide C is 20 amino acids in length and peptide D is 15 amino acids in length, and 14 out of 15 amino acids in peptide D are identical to those of a portion of peptide C, then peptides C and D have 70% sequence identity, but peptide D has 93.3% sequence identity to an optimal comparison window of peptide C. For the purpose of calculating “percent sequence identity” (or “percent sequence similarity”) herein, any gaps in aligned sequences are treated as mismatches at that position.

[0253] Any peptide/polypeptides described herein as having a particular percent sequence identity or similarity (e.g., at least 70%) with a reference sequence ID number, may also be expressed as having a maximum number of substitutions (or terminal deletions) with respect to that reference sequence. For example, a sequence having at least Y % sequence identity (e.g., 90%) with SEQ ID NO:Z (e.g., 100 amino acids) may have up to X substitutions (e.g., 10) relative to SEQ ID NO:Z, and may therefore also be expressed as “having X (e.g., 10) or fewer substitutions relative to SEQ ID NO:Z.”

[0254] As used herein, the term “physiological conditions” encompasses any conditions compatible with living cells, e.g., predominantly aqueous conditions of a temperature, pH, salinity, chemical makeup, etc. that are compatible with living cells.

[0255] As used herein, the term “sample” is used in its broadest sense. In one sense, it is meant to include a specimen or culture obtained from any source, as well as biological and environmental samples. Biological samples may be obtained from animals (including humans) and encompass fluids, solids, tissues, and gases. Biological samples include blood products, such as plasma, serum, and the like. Sample may also refer to cell lysates or purified forms of the enzymes, peptides, and/or polypeptides described herein. Cell lysates may include cells that have been lysed with a lysing agent or lysates such as rabbit reticulocyte or wheat germ lysates. Sample may also include cell-free expression systems. Environmental samples include environmental material such as surface matter, soil, water, crystals, and industrial samples. Such examples are not however to be construed as limiting the sample types applicable to the present invention.

[0256] As used herein, the terms “fusion,” “fusion polypeptide,” and “fusion protein” refer to a chimeric protein containing a first protein or polypeptide of interest joined to a second different peptide, polypeptide, or protein (e.g., interaction element).

[0257] As used herein, the terms “conjugated” and “conjugation” refer to the covalent attachment of two molecular entities (e.g., post-synthesis and/or during synthetic production). The attachment of a peptide or small molecule tag to a protein or small molecule, chemically (e.g., “chemically” conjugated) or enzymatically, is an example of conjugation.

[0258] As used herein, the terms “polypeptide component” or “peptide component” are used synonymously with the terms “polypeptide component of a [mutant dehalogenase] complex” or “peptide component of a [mutant dehalogenase] complex.” Typically, as used herein, a polypeptide component or peptide component is capable of forming a complex with a second component to form a desired complex, under appropriate conditions.

[0259] As used herein, the term “dehalogenase” refers to an enzyme that catalyzes the removal of a halogen atom from a substrate. The term “haloalkane dehalogenase” refers to an enzyme that catalyzes the removal of a halogen from a haloalkane substrate to produce an alcohol and a halide. Dehalogenases and haloalkyl dehalogenases belong to the hydrolase enzyme family, and may be referred to herein or elsewhere as such.

[0260] As used herein, the term “modified dehalogenase” refers to a dehalogenase variant (artificial variant) that has mutations that prevent the release of the substrate from the protein following removal of the halogen, resulting in a covalent bond between the substrate and the modified dehalogenase. Because the modified dehalogenase does not release the substrate, it is not capable of turnover, and is not a classical enzyme. The HALOTAG system (Promega) is a commercially available modified dehalogenase and substrate system.

[0261] As used herein, the term “circularly-permuted” (“cp”) refers to a polypeptide in which the N- and C-termini have been joined together, either directly or through a linker, to produce a circularly-permuted polypeptide, and then the circularly-permuted polypeptide is opened at a location other than between the N- and C-termini to produce a new linear polypeptide with termini different from the termini in the original polypeptide. The location at which the circularly-permuted polypeptide is opened is referred to herein as the “cp site.” Circular permutants include those polypeptides with sequences and structures that are equivalent to a polypeptide that has been circularized and then opened. Thus, a cp polypeptide may be synthesized de novo as a linear molecule and never go through a circularization and opening step. The preparation of circularly permutated derivatives is described in WO95/27732; incorporated by reference in its entirety.

[0262] As used herein, the term “split” (“sp”) refers to refers to a polypeptide that has been divided into two fragments at an interior site of the original polypeptide. The fragments of a sp polypeptide may reconstitute the activity of the original polypeptide if they are structurally complementary and able to form an active complex. A nomenclature herein for referring to split components of a polypeptide recites a position number from the full polypeptide that corresponds to the last residue in the N-terminal component of the split polypeptide. For example, if a polypeptide is 100 residues in length, a sp52 version of that polypeptide comprises a first fragment corresponding to positions 1-52 of the parent polypeptide and a second fragment corresponding to positions 53-100 of the parent polypeptide. As another example, spHT(45) refers to a split variant of the commercially-available HALOTAG protein in which the first fragment comprises residues 1-45 of the HALOTAG polypeptide sequence and the second fragment comprises residues 46-297 of the HALOTAG polypeptide sequence. Alternatively, a component of a split polypeptide may be expressed herein by referring to the name of the polypeptide from which it is derived, the residues within the source polypeptide that are present in the component (in brackets), followed by any substitutions in the component relative to the source polypeptide (in parenthesis). For example, a split component of the commercially-available HALOTAG protein corresponding to position 22-297 of the HALOTAG sequence could be written HaloTag[22-297]. If the second position of the component contained a M to F substitution, the components could be referred to as HaloTag[22-297](M2F). Components may contain an N-terminal methionine residues not present in the source sequence; such residues are counted in referring to the location of substitutions but not in the numbering of the fragment within the source polypeptide.

[0263] As used herein, the term “gapped” refers to split variant of a polypeptide that is missing a segment of the original polypeptide. For example, a “gapped sp polypeptide” is one that is missing a segment of the original sequence that occurs at the site of the split.

[0264] As used herein, the term “overlapped” refers to split variant of a polypeptide that contains a duplication of a segment of the original polypeptide. For example, an “overlapped sp polypeptide” is one in which a segment of the original sequence adjacent to the split site is present (duplicated) at the C-terminus of a first fragment and the N-terminus of the second fragment.

### DETAILED DESCRIPTION

[0265] Provided herein are peptide and polypeptide sequences that structurally assemble to form active, modified dehalogenase structures capable of binding (e.g., covalently) to a haloalkyl ligand. In particular, provided herein are split dehalogenase variants that assemble through structural complementation into active dehalogenase complexes, and systems and methods of use thereof.

[0266] Split mutant proteins, i.e., enzymes mutated to inhibit or eliminate catalytic activity, find use in revealing and analyzing protein interaction within cells, e.g., where each portion (fragment) of the split protein is fused to a different protein. Provided herein are split mutated hydrolases, such as those derived from the commercially available HALOTAG protein (Promega) and/or mutated hydrolases disclosed in U.S. published application 20060024808, the disclosure of which is incorporated by reference herein.

[0267] Even though these mutant hydrolases are not technically enzymes (no substrate turnover), the stable binding of a substrate thereto is dependent on proper protein structure. The consequence of re-associating the split fragments of a mutated hydrolase differs from that of a split enzyme system because the labeling function of a mutated hydrolase is retained on one of the fragments even after it has separated from its partner, whereas split enzymes are only active while they are brought together and bear no artifact of their prior activity after they are separated. In effect, the labeling reaction of a split mutant hydrolase provides a molecular memory of a protein interaction. In the case of fluorogenic ligands, the label is retained on one of the fragments, but may not be detectable after complex dissociation (since the fluorogen-activating contacts with the protein may be disrupted/absent); therefore, the combination of split dehalogenase and fluorogenic ligands produce a unique situation of permanent labeling, but with dynamic (on/off) fluorescence detection of the retained label.

[0268] As an example of a mutated hydrolase, a mutated dehalogenase provides for efficient labeling within a living cell or lysate thereof. This labeling is only conditional on the presence or expression of the protein and the presence of the labeled hydrolase substrate. In contrast, the labeling of a split mutant dehalogenase is dependent on a specific protein interaction occurring within the cell and the presence of the labeled hydrolase substrate. For instance, beta-arrestin may be fused with one fragment of a mutated hydrolase, and a G-coupled receptor may be fused with the other fragment. Upon receptor stimulation in the presence of the labeled substrate, beta-arrestin binds to the receptor causing a labeling reaction of either the receptor fusion or the beta-arrestin fusion (depending on which portion of the mutated hydrolase contains the reactive nucleophilic amino acid).

[0269] In some embodiments, provided herein is a split mutant hydrolase (e.g., split modified dehalogenase) system, which includes a first fragment of a hydrolase fused to a protein of interest and a second fragment of the hydrolase optionally fused to a ligand of the first protein of interest. At least one of the hydrolase fragments has a substitution that if present in a full-length mutant hydrolase (e.g., modified dehalogenase) having the sequence of the two fragments, forms a bond with a hydrolase substrate that is more stable than the bond formed between the corresponding full length wild type hydrolase and the hydrolase substrate. In one embodiment, each fragment of the hydrolase is fused to a protein of interest and the proteins of interest interact, e.g., bind to each other. In another embodiment, one hydrolase fragment is fused to a protein of interest, which interacts with a molecule in a sample. In another embodiment, in the presence of an agent (one or more agents of interest), or under certain conditions, a complex is formed by the binding of a fusion having the protein of interest fused to a first hydrolase fragment, to a second protein fused to a second hydrolase fragment or to the second hydrolase fragment and a cellular molecule.

[0270] Thus, the two fragments of the hydrolase (e.g., modified dehalogenase) together provide a mutant hydrolase that is structurally related to (and comprises significant sequence identity/similarity to (e.g., >70%)) a full-length hydrolase, but includes at least one amino acid substitution that results in covalent binding of the hydrolase substrate. The full-length mutant hydrolase lacks or has reduced catalytic activity relative to the corresponding full length wild type hydrolase, and specifically binds substrates which may be specifically bound by the corresponding full length wild-type hydrolase, however, no product or substantially less product, e.g., 2-, 10-, 100-, or 1000-fold less, is formed from the interaction between the mutant hydrolase and the substrate under conditions, which result in product formation by a reaction between the corresponding full length wild type hydrolase and substrate. The lack of, or reduced amounts of, product formation by the mutant hydrolase is due to at least one substitution in the full-length mutant hydrolase, which substitution results in the mutant hydrolase forming a bond with the substrate, which is more stable than the bond formed between the corresponding full length wild-type hydrolase and the substrate.

[0271] HALOTAG is a 297-residue self-labeling polypeptide (33 kDa) derived from a bacterial hydrolase (dehalogenase) enzyme, which has modified to covalently bind to its ligand, a haloalkane moiety. The HALOTAG ligand can be linked to solid surfaces (e.g., beads) or functional groups (e.g., fluorophores), and the HALOTAG polypeptide can be fused to various proteins of interest, allowing covalent attachment of the protein of interest to the solid surface or functional group.

[0272] The HALOTAG polypeptide is a hydrolase (e.g., modified dehalogenase) with a genetically modified active site, which specifically binds to the haloalkane ligand chloroalkane linker with an enhanced and increased rate of ligand binding (Pries et al. The Journal of Biological Chemistry. 270(18):10405-11; incorporated by reference in its entirety). The reaction that forms the bond between the protein tag and chloroalkane linker is fast and essentially irreversible under physiological conditions (Waugh DS (June 2005). Trends in Biotechnology. 23(6):316-20; incorporated by reference in its entirety). In the natural hydrolase enzyme, nucleophilic attack of the chloroalkane reactive linker causes displacement of the halogen with an amino acid residue, which results in the formation of a covalent alkyl-enzyme intermediate. This intermediate would then be hydrolyzed by an amino acid residue within the wild-type hydrolase (Chen et al. (February 2005) Current Opinion in Biotechnology. 16(1):35-40; incorporated by reference in its entirety). This would lead to regeneration of the enzyme following the reaction. However, with HALOTAG, the modified haloalkane dehalogenase, the reaction intermediate cannot proceed through the second reaction because it cannot be hydrolyzed due to the mutation in the enzyme. This causes the intermediate to persist as a stable covalent adduct with which there is no associated back reaction (Marks et al. (August 2006) Nature Methods. 3 (8): 591-6; incorporated by reference in its entirety).

[0273] HALOTAG fusion proteins can be expressed using standard recombinant protein expression techniques (Adams et al. (May 2002) Journal of the American Chemical Society. 124(21):6063-76; incorporated by reference in its entirety). Since the HALOTAG polypeptide is a relatively small protein, and the reactions are foreign to mammalian cells, there is no interference by endogenous mammalian metabolic reactions (Naested et al. The Plant Journal. 18(5):571-6; incorporated by reference in its entirety). Once the fusion protein has been expressed, there is a wide range of potential areas of experimentation including enzymatic assays, cellular imaging, protein arrays, determination of sub-cellular localization, and many additional possibilities (Janssen DB (April 2004). Current Opinion in Chemical Biology. 8(2):150-9; incorporated by reference in its entirety).

[0274] Various HALOTAG ligands, functional groups, fusions, assays, modifications, uses, etc. are described in U.S. Pat. Nos. 8,748,148; 9,593,316; 10,246,690; 8,742,086; 9,873,866; 10,604,745; U.S. Pat. App. 2009/0253131; U.S. Pat. App. 2010/0273186; 20130337539; U.S. Pat. App. 2012/0258470; U.S. Pat. App. 2012/0252048; U.S. Pat. App. 2011/0201024; U.S. 2014/0322794; each of which is incorporated by reference in their entireties.

[0275] Since reversible protein complementation systems and biosensors have been demonstrated to be particularly useful tools for measuring functional dynamics with cell imaging, such as protein interactions or changes in metabolite concentration, experiments were conducted during development of embodiments herein to identify regions within the HALOTAG sequence that are amenable to design strategies that allow control of its self-labeling activity in a dynamic way. A comprehensive screen was first performed to identify all possible circular permutation sites in the HALOTAG protein that retain activity and stability in the context of a single polypeptide and/or conditionally-separable fragments. Using the information gained from this screen, split HALOTAG pairs were designed and tested.

[0276] In some embodiments, provided herein are HALOTAG-based systems tailored for functional biology, such as split HATOTAG polypeptides, with properties similar to existing full-length protein in terms of stability, solubility, and expression of the fragments, with the additional characteristic of being able to reconstitute a significant fraction of its activity upon reconstitution of the full enzyme. HALOTAG ligands of particular importance to certain embodiments herein include fluorogenic ligands. Systems combining spHT can be engineered to have a range of fragment affinities to enable both facilitated and spontaneous complementation systems. Split HALOTAG systems facilitate endogenous tagging of proteins and make fluorogenic ligands or sensors better through higher signal, stability, dynamic range, etc. The HALOTAG-based functional biology tools described herein are well suited for measuring protein dynamics in live cells using fluorescence imaging, an application where other technologies lack the utility of HALOTAG's self-labeling activity or sensitivity of fluorescent chloroalkane ligands.

[0277] As described herein, embodiments are not limited to the HALOTAG sequence. In some embodiments, provided herein are split modified dehalogenases that differ in sequence from SEQ ID NO: 1. In some embodiments, provided herein are split dehalogenases that lack the mutation(s) (e.g., 272 and/or 106) that produce covalent bonding to the haloalkane substrate. Such sp dehalogenases are true enzymes capable of substrate turnover, but otherwise comprising the sequences and characteristics of the embodiments described herein.

[0278] Experiments were conducted during development of embodiments herein to examine split dehalogenases, their ability to assemble into active dehalogenase structures, and their ability to activate fluorogenic substrates. Initially, a comprehensive screen of all circular permutants of HaloTag (cpHT) revealed that 228/296 (77%) reacted with CA-TMR, and 50 variants had at least 10% of native HT activity on CA-AlexaFluor488. Seventeen cpHT variants had increased thermal stability relative to HT, and 38 variants exhibited activity recovery after thermal denaturation, presumably by protein refolding. The most active variants by Alexa Fluor488 velocity clustered in a region distal from the lid domain (residues 133-215), but this effect may be particular to this substrate, which is negatively-charged and may be sensitive to lid domain perturbations. Indeed, when using the neutral TMR ligand, the clustering effect was less apparent. With the exception of cpHTs near residue 111 and 120, all the refolding variants were localized to the lid domain, and all the thermostabilized variants were also in the lid domain. From these results, 22 candidates identified in the cpHT screen were pursued for further testing as true split proteins (spHT). A set of spHT variants, as fusions to FRB and FKBP, were identified which exhibit rapamycin-inducible complementation, evidenced by activation of a fluorogenic HT ligand (e.g., spHT(133), spHT(145), spHT(157), spHT(180), and spHT(195), etc.). This functionality extends to pairs of spHT fragments containing varying degrees of sequence overlap localized to the lid subdomain of HT. Further investigation into disturbances in the lid subdomain revealed the critical function of Helix 8 in activating bound fluorogenic ligands. The spHT complexes displayed diverse behaviors in terms of reversibility, with three fully-reversible complexes and one irreversible complex identified in rapamycin/FK506 competition experiments, and an overall stabilizing effect noted for the JF646-bound states of all the complexes. spHT-FRB/FKBP fragments were co-expressed in mammalian cells and noted that the complexes form spontaneously, presumably through co-translational folding. Taken together, this work demonstrates a wide functional utility for spHT designs, several of which display unique properties.

[0279] In some embodiments, provided herein are spHT polypeptides and systems thereof. In particular sp-modified dehalogenases are provided that are capable of reconstituting all or a portion of the activity of the parent dehalogenase.

[0280] In some embodiments, the polypeptide, peptides, fragments, and combinations thereof described herein are derived from a modified dehalogenase sequence of SEQ ID NO: 1:

MAEIGTGFPFDPHYVEVLGERMHYVDVGPRDGTPVLFLHGNPTSSYVWR
NIIPHVAPTHRCIAPDLIGMGKSDKPDLGYFFDDHVRFMDAFIEALGLE
EVVLVIHDWGSALGFHWAKRNPERVKGIAFMEFIRPIPTWDEWPEFARE
TFQAFRITDVGRKLIIDQNVFIEGTLPMGVVRPLTEVEMDHYREPFLNP
VDREPLWRFPNELPIAGEPANIVALVEEYMDWLHQSPVPKLLFWGTPGV
LIPPAEAARLAKSLPNCKAVDIGPGLNLLQEDNPDLIGSEIARWLSTLE
ISG.

[0281] In some embodiments, peptides and polypeptides herein comprise at least 70% sequence identity with all or a portion of SEQ ID NO: 1 (e.g., >70% sequence identity, >75% sequence identity, >80% sequence identity, >85% sequence identity, >90% sequence identity, >95% sequence identity, >96% sequence identity, >97% sequence identity, >98% sequence identity, >99% sequence identity). In some embodiments, peptides and polypeptides herein comprise 100% sequence identity with all or a portion of SEQ ID NO: 1. In some embodiments, peptides and polypeptides herein comprise at least 70% sequence similarity with all or a portion of SEQ ID NO: 1 (e.g., >70% sequence similarity, >75% sequence similarity, >80% sequence similarity, >85% sequence similarity, >90% sequence similarity, >95% sequence similarity, >96% sequence similarity, >97% sequence similarity, >98% sequence similarity, >99% sequence similarity). In some embodiments, peptides and polypeptides herein comprise 100% sequence similarity with all or a portion of SEQ ID NO: 1.

[0282] In some embodiments, peptides or polypeptides herein comprise an A at a position corresponding to position 2 of SEQ ID NO: 1. In other embodiments, peptides or polypeptides herein comprise an S at a position corresponding to position 2 of SEQ ID NO: 1. In some embodiments, peptides or polypeptides herein comprise a V at a position corresponding to position 47 of SEQ ID NO: 1. In some embodiments, peptides or polypeptides herein comprise a T at a position corresponding to position 58 of SEQ ID NO: 1. In some embodiments, peptides or polypeptides herein comprise a G at a position corresponding to position 78 of SEQ ID NO: 1. In some embodiments, peptides or polypeptides herein comprise a F at a position corresponding to position 88 of SEQ ID NO: 1. In some embodiments, peptides or polypeptides herein comprise a M at a position corresponding to position 89 of SEQ ID NO: 1. In some embodiments, peptides or polypeptides herein comprise a F at a position corresponding to position 128 of SEQ ID NO: 1. In some embodiments, peptides or polypeptides herein comprise a T at a position corresponding to position 155 of SEQ ID NO: 1. In some embodiments, peptides or polypeptides herein comprise a K at a position corresponding to position 160 of SEQ ID NO: 1. In some embodiments, peptides or polypeptides herein comprise a V at a position corresponding to position 167 of SEQ ID NO: 1. In some embodiments, peptides or polypeptides herein comprise a T at a position corresponding to position 172 of SEQ ID NO: 1. In some embodiments, peptides or polypeptides herein comprise a M at a position corresponding to position 175 of SEQ ID NO: 1. In some embodiments, peptides or polypeptides herein comprise a G at a position corresponding to position 176 of SEQ ID NO: 1. In some embodiments, peptides or polypeptides herein comprise a N at a position corresponding to position 195 of SEQ ID NO: 1. In some embodiments, peptides or polypeptides herein comprise a E at a position corresponding to position 224 of SEQ ID NO: 1. In some embodiments, peptides or polypeptides herein comprise a D at a position corresponding to position 227 of SEQ ID NO: 1. In some embodiments, peptides or polypeptides herein comprise a K at a position corresponding to position 257 of SEQ ID NO: 1. In some embodiments, peptides or polypeptides herein comprise an A at a position corresponding to position 264 of SEQ ID NO: 1. In some embodiments, peptides or polypeptides herein comprise a N at a position corresponding to position 272 of SEQ ID NO: 1. In some embodiments, peptides or polypeptides herein comprise a L at a position corresponding to position 273 of SEQ ID NO: 1. In some embodiments, peptides or polypeptides herein comprise a S at a position corresponding to position 291 of SEQ ID NO: 1. In some embodiments, peptides or polypeptides herein comprise a T at a position corresponding to position 292 of SEQ ID NO: 1. In some embodiments, peptides or polypeptides herein comprise a E at a position corresponding to position 294 of SEQ ID NO: 1. In some embodiments, peptides or polypeptides herein comprise a I at a position corresponding to position 295 of SEQ ID NO: 1. In some embodiments, peptides or polypeptides herein comprise a S at a position corresponding to position 296 of SEQ ID NO: 1. In some embodiments, peptides or polypeptides herein comprise a G at a position corresponding to position 297 of SEQ ID NO: 1.

[0283] In some embodiments, peptides or polypeptides herein do not have an S at a position corresponding to position 2 of SEQ ID NO: 1. In some embodiments, peptides or polypeptides herein do not have a L at a position corresponding to position 47 of SEQ ID NO: 1. In some embodiments, peptides or polypeptides herein do not have a S at a position corresponding to position 58 of SEQ ID NO: 1. In some embodiments, peptides or polypeptides herein do not have a D at a position corresponding to position 78 of SEQ ID NO: 1. In some embodiments, peptides or polypeptides herein do not have a Y at a position corresponding to position 88 of SEQ ID NO: 1. In some embodiments, peptides or polypeptides herein do not have a L at a position corresponding to position 89 of SEQ ID NO: 1. In some embodiments, peptides or polypeptides herein do not have a C at a position corresponding to position 128 of SEQ ID NO: 1. In some embodiments, peptides or polypeptides herein do not have an A at a position corresponding to position 155 of SEQ ID NO: 1. In some embodiments, peptides or polypeptides herein do not have a E at a position corresponding to position 160 of SEQ ID NO: 1. In some embodiments, peptides or polypeptides herein do not have an A at a position corresponding to position 167 of SEQ ID NO: 1. In some embodiments, peptides or polypeptides herein do not have an A at a position corresponding to position 172 of SEQ ID NO: 1. In some embodiments, peptides or polypeptides herein do not have a K at a position corresponding to position 175 of SEQ ID NO: 1. In some embodiments, peptides or polypeptides herein do not have a C at a position corresponding to position 176 of SEQ ID NO: 1. In some embodiments, peptides or polypeptides herein do not have a K at a position corresponding to position 195 of SEQ ID NO: 1. In some embodiments, peptides or polypeptides herein do not have an A at a position corresponding to position 224 of SEQ ID NO: 1. In some embodiments, peptides or polypeptides herein do not have a N at a position corresponding to position 227 of SEQ ID NO: 1. In some embodiments, peptides or polypeptides herein do not have a E at a position corresponding to position 257 of SEQ ID NO: 1. In some embodiments, peptides or polypeptides herein do not have a T at a position corresponding to position 264 of SEQ ID NO: 1. In some embodiments, peptides or polypeptides herein do not have a H at a position corresponding to position 272 of SEQ ID NO: 1. In some embodiments, peptides or polypeptides herein do not have a Y at a position corresponding to position 273 of SEQ ID NO: 1. In some embodiments, peptides or polypeptides herein do not have a P at a position corresponding to position 291 of SEQ ID NO: 1. In some embodiments, peptides or polypeptides herein do not have an A at a position corresponding to position 292 of SEQ ID NO: 1. In some embodiments, peptides or polypeptides herein do not have an amino acid at a position corresponding to position 294 of SEQ ID NO: 1. In some embodiments, peptides or polypeptides herein do not have an amino acid at a position corresponding to position 295 of SEQ ID NO: 1. In some embodiments, peptides or polypeptides herein do not have an amino acid at a position corresponding to position 296 of SEQ ID NO: 1. In some embodiments, peptides or polypeptides herein do not have an amino acid at a position corresponding to position 297 of SEQ ID NO: 1.

[0284] As described herein, embodiments are not limited to the HALOTAG sequence. In some embodiments, provided herein are split modified dehalogenases that differ in sequence from SEQ ID NO: 1. In some embodiments, provided herein are split dehalogenases that lack the mutation(s) (e.g., 272 and/or 106) that produce covalent bonding to the haloalkane substrate. Such split dehalogenases are true enzymes capable of substrate turnover, but otherwise comprising the sequences and characteristics of the embodiments described herein.

[0285] In some embodiments, a sp dehalogenase (e.g., spHT) comprises two peptide and/or polypeptide components that collectively comprise at least 70% sequence identity with all or a portion of SEQ ID NO: 1 (e.g., >70% sequence identity, >75% sequence identity, >80% sequence identity, >85% sequence identity, >90% sequence identity, >95% sequence identity, >96% sequence identity, >97% sequence identity, >98% sequence identity, >99% sequence identity). For example, the first peptide/polypeptide component of the sp polypeptide corresponds to a first portion of SEQ ID NO: 1 (e.g., at least 70% sequence identity to the first portion) and the first peptide/polypeptide component of the sp polypeptide corresponds to a second portion of SEQ ID NO: 1 (e.g., at least 70% sequence identity to the second portion). In some embodiments, a sp dehalogenase (e.g., spHT) comprises two fragments that collectively comprise 100% sequence identity with all or a portion of SEQ ID NO: 1. For example, the first fragment of the sp polypeptide has 100% sequence identity to a first portion of SEQ ID NO: 1 and the second fragment of the sp polypeptide has 100% sequence identity to a second portion SEQ ID NO: 1.

[0286] In some embodiments, a sp dehalogenase (e.g., spHT) comprises two peptide and/or polypeptide components that collectively comprise at least 70% sequence similarity with all or a portion of SEQ ID NO: 1 (e.g., >70% sequence similarity, >75% sequence similarity, >80% sequence similarity, >85% sequence similarity, >90% sequence similarity, >95% sequence similarity, >96% sequence similarity, >97% sequence similarity, >98% sequence similarity, >99% sequence similarity). For example, the first peptide/polypeptide component of the sp polypeptide corresponds to a first portion of SEQ ID NO: 1 (e.g., at least 70% sequence similarity to the first portion), and the first peptide/polypeptide component of the sp polypeptide corresponds to a second portion of SEQ ID NO: 1 (e.g., at least 70% sequence similarity to the second portion). In some embodiments, a sp dehalogenase (e.g., spHT) comprises two fragments that collectively comprise 100% sequence similarity with all or a portion of SEQ ID NO: 1. For example, the first fragment of the sp polypeptide has 100% sequence similarity to a first portion of SEQ ID NO: 1, and the second fragment of the sp polypeptide has 100% sequence similarity to a second portion SEQ ID NO: 1.

[0287] In some embodiments, a sp dehalogenase (e.g., spHT) comprises a sp site. The sp site is an internal location in the parent sequence that defines the C-terminus of the first component or fragment and the N-terminus of the second component or fragment of the sp dehalogenase. For example, if a theoretical a 100 amino acid polypeptide were split with a sp site between residues 57 and 58 of the parent polypeptide (referred to herein as a sp site of 57), the first component polypeptide would correspond to positions 1-57 of SEQ ID NO: 1, and the second component polypeptide would correspond to positions 58-100 of SEQ ID NO: 1. In some embodiments herein, a sp site within SEQ ID NO: 1 may occur at any position from position 5 of SEQ ID NO:1 to position 290 of SEQ ID NO: 1. In some embodiments, SEQ ID NOS: 2-577 are exemplary components of spHT polypeptides having 100% sequence identity to SEQ ID NO: 1. In some embodiments, an active spHT complex is formed between two fragments that collectively comprise amino acids corresponding to each position in SEQ ID NO: 1. For example, a polypeptide having a sequence of SEQ ID NO: 26 and a peptide having a sequence of SEQ ID NO: 27 collectively comprise amino acids corresponding to each position in SEQ ID NO: 1. Any pairs of peptide and polypeptides (or two polypeptides) corresponding to two of SEQ ID NO:S 2-577 and together comprising amino acids corresponding to each position in SEQ ID NO: 1 (without deletion or duplication of positions) find use in embodiments herein. In some embodiments, a spHT dehalogenase comprises any of the following pairs of fragment: SEQ ID NOS: 2 and 3, 4 and 5, 6 and 7, 8 and 9, 10 and 11, 12 and 13, 14 and 15, 16 and 17, 18 and 19, 20 and 21, 22 and 23, 24 and 25, 26 and 27, 28 and 29, 30 and 31, 32 and 33, 34 and 35, 36 and 37, 38 and 39, 40 and 41, 42 and 43, 44 and 45, 46 and 47, 48 and 49, 50 and 51, 52 and 53, 54 and 55, 56 and 57, 58 and 59, 60 and 61, 62 and 63, 64 and 65, 66 and 67, 68 and 69, 70 and 71, 72 and 73, 74 and 75, 76 and 77, 78 and 79, 80 and 81, 82 and 83, 84 and 85, 86 and 87, 88 and 89, 90 and 91, 92 and 93, 94 and 95, 96 and 97, 98 and 99, 100 and 101, 102 and 103, 104 and 105, 106 and 107, 108 and 109, 110 and 111, 112 and 113, 114 and 115, 116 and 117, 118 and 119, 120 and 121, 121, 122 and 123, 124 and 125, 126 and 127, 128 and 129, 130 and 131, 132 and 133, 134 and 135, 136 and 137, 138 and 139, 140 and 141, 142 and 143, 144 and 145, 146 and 147, 148 and 149, 150 and 151, 152 and 153, 154 and 155, 156 and 157, 158 and 159, 160 and 161, 172 and 173, 174 and 175, 176 and 177, 178 and 179, 180 and 181, 182 and 183, 184 and 185, 186 and 187, 188 and 189, 190 and 191, 192 and 193, 194 and 195, 196 and 197, 198 and 199, 200 and 201, 202 and 203, 204 and 205, 206 and 207, 208 and 209, 190 and 211, 212 and 213, 214 and 215, 216 and 217, 218 and 219, 220 and 221, 222 and 223, 224 and 225, 226 and 227, 228 and 229, 300 and 301, 302 and 303, 304 and 305, 306 and 307, 308 and 309,310 and 311,312 and 313,314 and 315,316 and 317,318 and 319,320 and 321,322 and 323, 324 and 325, 326 and 327, 328 and 329, 330 and 331, 332 and 333, 334 and 335, 336 and 337, 338 and 339, 340 and 341, 342 and 343, 344 and 345, 346 and 347, 348 and 349, 350 and 351, 352 and 353, 354 and 355, 356 and 357, 358 and 359, 360 and 361, 362 and 363, 364 and 365, 366 and 367, 368 and 369, 370 and 371, 372 and 373, 374 and 375, 376 and 377, 378 and 379, 380 and 381, 382 and 383, 384 and 385, 386 and 387, 388 and 389, 390 and 391, 392 and 393, 394 and 395, 396 and 397, 398 and 399, 400 and 401, 402 and 403, 404 and 405, 406 and 407, 408 and 409, 410 and 411, 412 and 413, 414 and 415, 416 and 417, 418 and 419, 420 and 421, 422 and 423, 424 and 425, 426 and 427, 428 and 429, 430 and 431, 432 and 433, 434 and 435, 436 and 437, 438 and 439, 440 and 441, 442 and 443, 444 and 445, 446 and 447, 448 and 449, 450 and 451, 452 and 453, 454 and 455, 456 and 457, 458 and 459, 460 and 461, 462 and 463, 464 and 465, 466 and 467, 468 and 469, 470 and 471, 472 and 473, 474 and 475, 476 and 477, 478 and 479, 480 and 481, 482 and 483, 484 and 485, 486 and 487, 488 and 489, 490 and 491, 492 and 493, 494 and 495, 496 and 497, 498 and 499, 500 and 501, 502 and 503, 504 and 505, 506 and 507, 508 and 509, 510 and 511, 512 and 513, 514 and 515, 516 and 517, 518 and 519, 520 and 521, 522 and 523, 524 and 525, 526 and 527, 528 and 529, 530 and 531, 532 and 533, 534 and 535, 536 and 537, 538 and 539, 540 and 541, 542 and 543, 544 and 545, 546 and 547, 548 and 549, 550 and 551, 552 and 553, 554 and 555, 556 and 557, 558 and 559, 560 and 561, 562 and 563, 564 and 565, 566 and 567, 568 and 569, 570 and 571, 572 and 573, 574 and 575, and 576 and 577.

[0288] In some embodiments, a spHT comprises a peptide and polypeptide (or two polypeptides) pair corresponding to two of SEQ ID NOS: 2-577 together comprising amino acids corresponding to each position in SEQ ID NO: 1, but with a deletion of up to 40 amino acids in length (e.g., 1, 2, 3, 4, 5, 6, 7, 8, 9, 10, 15, 20, 25, 30, 35, 40, or ranges therebetween) at the C-terminus or N-terminus of one or both of fragments. For example, a pair corresponding to SEQ ID NOS: 7 and 28 together correspond to positions of SEQ ID NO: 1, but with an 11 residue deletion. In some embodiments, any pairs of SEQ ID NOS: 2-577, together corresponding to the sequence of SEQ ID NO: 1, but with deletions of up to 40 amino acids, are within the scope of spHTs herein. In some embodiments, the deletion is adjacent to the split site. In some embodiments, the deletion corresponds to the N- or C-terminus of SEQ ID NO: 1.

[0289] In some embodiments, a spHT comprises a peptide and polypeptide (or two polypeptides) pair corresponding to two of SEQ ID NOS: 2-577 together comprising amino acids corresponding to each position in SEQ ID NO: 1, but with a duplication of up to 40 amino acids in length (e.g., 1, 2, 3, 4, 5, 6, 7, 8, 9, 10, 15, 20, 25, 30, 35, 40, or ranges therebetween) at the C-terminus or N-terminus of one or both of fragments. For example, a pair corresponding to SEQ ID NOS: 6 and 29 together correspond to positions of SEQ ID NO: 1, but with an 11 residue duplication. In some embodiments, any pairs of SEQ ID NOS: 2-577, together corresponding to the sequence of SEQ ID NO: 1, but with duplications of up to 40 amino acids, are within the scope of spHTs herein. In some embodiments, the duplication is adjacent to the split site. In some embodiments, the duplication corresponds to the N- or C-terminus of SEQ ID NO: 1.

[0290] Fragments utilizing any sp sites, for example, corresponding to a position between position 5 and position 290 of SEQ ID NO: 1 are readily envisioned and within the scope herein.

[0291] In some embodiments, spHTs are provided with a sp site corresponding to position 5, 6, 7, 8, 9, 10, 11, 12, 13, 14, 15, 16, 17, 18, 19, 31, 21, 22, 23, 24, 25, 26, 27, 28, 29, 30, 31, 32, 33, 34, 35, 36, 37, 38, 39, 40, 41, 42, 43, 44, 45, 46, 47, 48, 49, 50, 51, 52, 53, 54, 55, 56, 57, 58, 59, 60, 61, 62, 63, 64, 65, 66, 67, 68, 69, 70, 71, 72, 73, 74, 75, 76, 77, 78, 79, 80, 81, 82, 83, 84, 85, 86, 87, 88, 89, 90, 91, 92, 93, 94, 95, 96, 97, 98, 99, 100, 101, 102, 313, 104, 105, 106, 107, 108, 109, 110, 111, 112, 113, 114, 115, 116, 117, 118, 119, 120, 121, 122, 123, 124, 125, 126, 127, 128, 129, 130, 131, 132, 133, 134, 135, 136, 137, 138, 139, 140, 141, 142, 143, 144, 145, 146, 147, 148, 149, 150, 151, 152, 153, 154, 155, 156, 157, 158, 159, 160, 161, 162, 163, 164, 165, 166, 167, 168, 169, 170, 171, 172, 173, 174, 175, 176, 177, 178, 179, 180, 181, 182, 183, 184, 185, 186, 187, 188, 189, 190, 191, 192, 193, 194, 195, 196, 197, 198, 199, 310, 311, 312, 313, 314, 315, 316, 317, 318, 319, 210, 211, 212, 213, 214, 215, 216, 217, 218, 219, 220, 221, 222, 223, 224, 225, 226, 227, 228, 229, 230, 231, 232, 233, 234, 235, 236, 237, 238, 239, 240, 241, 242, 243, 244, 245, 246, 247, 248, 249, 250, 251, 252, 253, 254, 255, 256, 257, 258, 259, 260, 261, 262, 263, 264, 265, 266, 267, 268, 269, 270, 271, 272, 273, 274, 275, 276, 277, 278, 279, 280, 281, 282, 283, 284, 285, 286, 287, 288, 289, or 290 of SEQ ID NO: 1.

[0292] In some embodiments, spHTs are provided with a sp site corresponding to a position between positions 5 and 13, 36 and 51, 63 and 72, 84 and 92, 104 and 130, 142 and 148, 160 and 174, 186 and 189, 311 and 313, 221 and 229, or 269 and 290, of SEQ ID NO: 1.

[0293] In some embodiments, sp peptides and polypeptides are provided having 70%-100% sequence identity to one of SEQ ID NOS: 2-557 (e.g., >70% sequence identity, >75% sequence identity, >80% sequence identity, >85% sequence identity, >90% sequence identity, >95% sequence identity, >96% sequence identity, >97% sequence identity, >98% sequence identity, >99% sequence identity). In some embodiments, sp peptides and polypeptides are provided having 70%-100% sequence similarity to one of SEQ ID NOS: 2-557 (e.g., >70% sequence similarity, >75% sequence similarity, >80% sequence similarity, >85% sequence similarity, >90% sequence similarity, >95% sequence similarity, >96% sequence similarity, >97% sequence similarity, >98% sequence similarity, >99% sequence similarity).

[0294] In some embodiments, pairs of sp peptides and/or polypeptides are provided that are capable of forming active sp dehalogenase complexes (active spHT complexes). Such pairs comprise at least 70% sequence identity or similarity to two of SEQ ID NOS: 2-557, and together comprise residues corresponding to 100% of the positions in SEQ ID NO: 1, allowing for up to 40 deletions or duplications at the C- or N-terminus of the peptides/polypeptides.

[0295] In some embodiments, the first fragment of a spHT complementary pair corresponds to position 1 through position 5, 6, 7, 8, 9, 10, 11, 12, 13, 14, 15, 16, 17, 18, 19, 31, 21, 22, 23, 24, 25, 26, 27, 28, 29, 30, 31, 32, 33, 34, 35, 36, 37, 38, 39, 40, 41, 42, 43, 44, 45, 46, 47, 48, 49, 50, 51, 52, 53, 54, 55, 56, 57, 58, 59, 60, 61, 62, 63, 64, 65, 66, 67, 68, 69, 70, 71, 72, 73, 74, 75, 76, 77, 78, 79, 80, 81, 82, 83, 84, 85, 86, 87, 88, 89, 90, 91, 92, 93, 94, 95, 96, 97, 98, 99, 100, 101, 102, 313, 104, 105, 106, 107, 108, 109, 110, 111, 112, 113, 114, 115, 116, 117, 118, 119, 120, 121, 122, 123, 124, 125, 126, 127, 128, 129, 130, 131, 132, 133, 134, 135, 136, 137, 138, 139, 140, 141, 142, 143, 144, 145, 146, 147, 148, 149, 150, 151, 152, 153, 154, 155, 156, 157, 158, 159, 160, 161, 162, 163, 164, 165, 166, 167, 168, 169, 170, 171, 172, 173, 174, 175, 176, 177, 178, 179, 180, 181, 182, 183, 184, 185, 186, 187, 188, 189, 190, 191, 192, 193, 194, 195, 196, 197, 198, 199, 310, 311, 312, 313, 314, 315, 316, 317, 318, 319, 210, 211, 212, 213, 214, 215, 216, 217, 218, 219, 220, 221, 222, 223, 224, 225, 226, 227, 228, 229, 230, 231, 232, 233, 234, 235, 236, 237, 238, 239, 240, 241, 242, 243, 244, 245, 246, 247, 248, 249, 250, 251, 252, 253, 254, 255, 256, 257, 258, 259, 260, 261, 262, 263, 264, 265, 266, 267, 268, 269, 270, 271, 272, 273, 274, 275, 276, 277, 278, 279, 280, 281, 282, 283, 284, 285, 286, 287, 288, 289, or 290 of SEQ ID NO: 1.

[0296] In some embodiments, the second fragment of a spHT complementary pair corresponds to position 7, 8, 9, 10, 11, 12, 13, 14, 15, 16, 17, 18, 19, 31, 21, 22, 23, 24, 25, 26, 27, 28, 29, 30, 31, 32, 33, 34, 35, 36, 37, 38, 39, 40, 41, 42, 43, 44, 45, 46, 47, 48, 49, 50, 51, 52, 53, 54, 55, 56, 57, 58, 59, 60, 61, 62, 63, 64, 65, 66, 67, 68, 69, 70, 71, 72, 73, 74, 75, 76, 77, 78, 79, 80, 81, 82, 83, 84, 85, 86, 87, 88, 89, 90, 91, 92, 93, 94, 95, 96, 97, 98, 99, 100, 101, 102, 313, 104, 105, 106, 107, 108, 109, 110, 111, 112, 113, 114, 115, 116, 117, 118, 119, 120, 121, 122, 123, 124, 125, 126, 127, 128, 129, 130, 131, 132, 133, 134, 135, 136, 137, 138, 139, 140, 141, 142, 143, 144, 145, 146, 147, 148, 149, 150, 151, 152, 153, 154, 155, 156, 157, 158, 159, 160, 161, 162, 163, 164, 165, 166, 167, 168, 169, 170, 171, 172, 173, 174, 175, 176, 177, 178, 179, 180, 181, 182, 183, 184, 185, 186, 187, 188, 189, 190, 191, 192, 193, 194, 195, 196, 197, 198, 199, 310, 311, 312, 313, 314, 315, 316, 317, 318, 319, 210, 211, 212, 213, 214, 215, 216, 217, 218, 219, 220, 221, 222, 223, 224, 225, 226, 227, 228, 229, 230, 231, 232, 233, 234, 235, 236, 237, 238, 239, 240, 241, 242, 243, 244, 245, 246, 247, 248, 249, 250, 251, 252, 253, 254, 255, 256, 257, 258, 259, 260, 261, 262, 263, 264, 265, 266, 267, 268, 269, 270, 271, 272, 273, 274, 275, 276, 277, 278, 279, 280, 281, 282, 283, 284, 285, 286, 287, 288, 289, or 290 of SEQ ID NO: 1 through position 294 of SEQ ID NO: 1.

[0297] In some embodiments, the duplicated portion of a spHT complementary pair is 1-40 amino acids in length (e.g., 1, 2, 3, 4, 5, 6, 7, 8, 9, 10, 11, 12, 13, 14, 15, 16, 17, 18, 19, 31, 21, 22, 23, 24, 25, 26, 27, 28, 29, 30, 31, 32, 33, 34, 35, 36, 37, 38, 39, 40, or ranges therebetween).

[0298] In some embodiments, the deleted portion of a spHTs complementary pair is 1-40 amino acids in length (e.g., 1, 2, 3, 4, 5, 6, 7, 8, 9, 10, 11, 12, 13, 14, 15, 16, 17, 18, 19, 31, 21, 22, 23, 24, 25, 26, 27, 28, 29, 30, 31, 32, 33, 34, 35, 36, 37, 38, 39, 40, or ranges therebetween).

[0299] The exemplary spHT fragment sequences of SEQ ID NOS: 2-577 comprise 100% sequence identity to portions of SEQ ID NO: 1; there are no portions of these sequences that do not align with 100% sequence identity to SEQ ID NO: 1. However, as described herein, spHT peptides and polypeptides may have less than 100% sequence identity with SEQ ID NO: 1 (e.g., >70%, >75%, >80%, >85%, >90%, >95%, >96%, >97%, >98%, >99%, but less than 100% sequence identity). Therefore, peptides and polypeptide having less than 100% sequence identity with one of SEQ ID NOS: 2-577 (e.g., >70%, >75%, >80%, >85%, >90%, >95%, >96%, >97%, >98%, >99%, but less than 100% sequence identity) are provided herein and find use in the complementary pairs and complexes herein.

[0300] In some embodiments, a spHT complementary pair herein comprises a peptide corresponding to SEQ ID NO: 578 and a polypeptide corresponding to SEQ ID NO: 1188. SEQ NOS: 578 and 1188 are fragments of SEQ ID NO: 1 and have 100% sequence identity to portions of SEQ ID NO: 1. In some embodiments, a spHT complementary pair comprises a peptide having 100% sequence identity to SEQ ID NO: 578; such a peptide is referred to herein as “SmHT.” In some embodiments, a spHT complementary pair comprises a polypeptide having 100% sequence identity to SEQ ID NO: 1188; such a polypeptide is referred to herein as “LgHT.” Extensive experiments were conducted during development of embodiments herein to analyze variants of SmHT and LgHT. SEQ ID NOS: 579-1187 correspond to peptide variants having at least one and up to all positions of SEQ ID NO: 588 substituted. A peptide of each of SEQ ID NOS: 578-1187 was synthesized and tested for various characteristics, including the ability to form an active complex with a complementary LgHT variant polypeptide. SEQ ID NOS: 1189-3033 correspond to polypeptide variants having one or more substitutions relative to SEQ ID NO: 1188. A polypeptide of each of SEQ ID NOS: 1188-3033 was synthesized and tested for various characteristics, including the ability to form an active complex with a complementary SmHT variant peptide.

[0301] In some embodiments, provided herein is a SmHT peptide or SmHT variant peptide having at least 70% (e.g., 70%, 75%, 80%, 85%, 90%, 95%, 100%, or ranges therebetween) sequence similarity (e.g., conservative or semi-conservative similarity) with one of SEQ ID NOS: 578-1187. In some embodiments, a peptide corresponds to SmHT (SEQ ID NO: 578), but with one or more (e.g., 2, 3, 4, 5, 6, 7, 8, 9, 10, 11, 12, 13, 14, 15, 16, 17, or ranges therebetween) of the substitutions of one or more of SEQ ID NOS: 588-1187 relative to SEQ ID NO: 578. In some embodiments, a SmHT variant has 1-8 (e.g., 1, 2, 3, 4, 5, 6, 7, 8, or ranges therebetween) non-conservative substitutions relative to one of SEQ ID NOS: 578-1187.

[0302] In some embodiments, provided herein is a SmHT peptide or SmHT variant peptide comprising:

(SEQ ID NO: 3034)
X₁X₂X₃X₄X₅(F/W/Y/M/H)X₇(F/W/Y/D/R)X₉X₁₀X₁₁(F/W/Y/M/H/
R)(V/I/L/M/A/C)X₁₄(V/I/L/A/C/MI/L/F/W)X₁₆X₁₇;
and/or
(SEQ ID NO: 3035)
X₁X₂X₃X₄X₅(F/W/Y)X₇(F/W/Y)X₉X₁₀X₁₁(F/W/Y)(V/I/L/M)X₁₄
(V/I/L)X₁₆X₁₇;

[0303] wherein each X is any amino acid (e.g., proteinogenic amino acid).

[0304] In some embodiments, provided herein is a LgHT polypeptide or LgHT variant polypeptide having at least 70% (e.g., 70%, 75%, 80%, 85%, 90%, 95%, 100%, or ranges therebetween) sequence similarity (e.g., conservative or semi-conservative similarity) with one of SEQ ID NOS: 1188-3033. In some embodiments, a polypeptide corresponds to LgHT (SEQ ID NO: 1188), but with one or more (e.g., 2, 3, 4, 5, 6, 7, 8, 9, 10, 11, 12, 13, 14, 15, 16, 17, 18, 19, 20, 25, 30, or more, or ranges therebetween) of the substitutions of one or more of SEQ ID NOS: 1189-3033 relative to SEQ ID NO: 1188. In some embodiments, a LgHT variant has at least 70% (e.g., 70%, 75%, 80%, 85%, 90%, 95%, 100%, or ranges therebetween) sequence identity with one of SEQ ID NOS: 1188-3033.

[0305] In some embodiments, provided herein is a spHT complementary pair comprising (a) a SmHT peptide or SmHT variant peptide having (1) at least 70% (e.g., 70%, 75%, 80%, 85%, 90%, 95%, 100%, or ranges therebetween) sequence similarity (e.g., conservative or semi-conservative similarity) with one of SEQ ID NOS: 578-1187, (2) one or more (e.g., 2, 3, 4, 5, 6, 7, 8, 9, 10, 11, 12, 13, 14, 15, 16, 17, or ranges therebetween) substitutions relative to SEQ ID NO: 578, and/or (3) 1-8 (e.g., 1, 2, 3, 4, 5, 6, 7, 8, or ranges therebetween) non-conservative substitutions relative to one of SEQ ID NOS: 578-1187; and (b) a LgHT polypeptide or LgHT variant polypeptide having (1) at least 70% (e.g., 70%, 75%, 80%, 85%, 90%, 95%, 100%, or ranges therebetween) sequence similarity (e.g., conservative or semi-conservative similarity) with one of SEQ ID NOS: 1188-3033, (2) one or more (e.g., 2, 3, 4, 5, 6, 7, 8, 9, 10, 11, 12, 13, 14, 15, 16, 17, 18, 19, 20, 25, 30, or more, or ranges therebetween) substitutions relative to SEQ ID NO: 1188, and/or (3) at least 70% (e.g., 70%, 75%, 80%, 85%, 90%, 95%, 100%, or ranges therebetween) sequence identity with one of SEQ ID NOS: 1188-3033.

[0306] In some embodiments, the split hydrolase (e.g., spHT) and fragments thereof have enhanced thermal stability relative to the parent hydrolase sequence (e.g., HALOTAG).

[0307] The formation of a spHT complex from two complementary fragments may be reversible or irreversible. In some embodiments, a spHT complex is capable of being denatured, renatured, and having its activity reconstituted. In some embodiments, such spHTs find use in methods that comprise exposing samples containing the spHTs to denaturing conditions (e.g., manufacturing conditions, storage conditions, etc.) prior to substrate binding.

[0308] In some embodiments, provided herein are a fusions of the split hydrolases (e.g., dehalogenases (e.g., HALOTAG, etc.), etc.) with proteins of interest, interaction elements, localization elements, heterologous sequences, peptide tags, luciferases, or bioluminescent complexes, etc.

[0309] In certain embodiments, both fragments of a split hydrolase (e.g., spHT) are fused to heterologous sequences. In some embodiments, the heterologous sequences are substantially the same and specifically bind to each other, e.g., form a dimer, optionally in the absence of one or more exogenous agents. In another embodiment, the heterologous sequences are different and specifically bind to each other, optionally in the absence of one or more exogenous agents. In one embodiment, one hydrolase fragment is fused to a heterologous sequence and that heterologous sequence interacts with a cellular molecule. In another embodiment, each hydrolase fragment is fused to a heterologous sequence and in the presence of one or more exogenous agents or under specified conditions, the heterologous sequences interact. For instance, in the presence of rapamycin, a fragment of a hydrolase fused to rapamycin binding protein (FRB) and another fragment fused to FK506 binding protein (FKBP), yields a complex of the two fusion proteins. In one embodiment, in the presence of the exogenous agent(s) or under different conditions, the complex of fusion proteins does not form. In one embodiment, one heterologous sequence includes a domain, e.g., 3 or more amino acid residues, which optionally may be covalently modified, e.g., phosphorylated, that noncovalently interacts with a domain in the other heterologous sequence. The two fragments of the hydrolase, at least one of which is fused to a protein of interest, may be employed to detect reversible interactions, e.g., binding of two or more molecules, or other conformational changes or changes in conditions, such as pH, temperature or solvent hydrophobicity, or irreversible interactions.

[0310] The rapamycin/FRB/FKBP system provides an example of a small molecule inducing a protein-protein interaction that can be detected/monitored by the spHT systems herein. However, other systems of inducing formation of a spHT complex are within the scope herein. Other small molecule induced protein interactions find use in embodiments herein. Additionally, proteins interact (i.e., associate or dissociate) as a result of other events in cells that impact their local concentrations, e.g., direct physical association, co-localization, additive/subtractive abundance caused by stabilizing or degrading stimulus, additive/subtractive abundance controlled at genetic level (i.e., up-regulation, down-regulation). Embodiments herein find use in monitoring such effects in vitro and in vivo.

[0311] Heterologous sequences useful in the invention include, but are not limited to, those which interact in vitro and/or in vivo. For instance, the fusion protein may comprise (1) hydrolase fragment (e.g., portion of a spHT) and (2) an enzyme of interest, e.g., luciferase, RNasin or RNase, and/or a channel protein, a receptor, a membrane protein, a cytosolic protein, a nuclear protein, a structural protein, a phosphoprotein, a kinase, a signaling protein, a metabolic protein, a mitochondrial protein, a receptor associated protein, a fluorescent protein, an enzyme substrate, a transcription factor, a transporter protein and/or a targeting sequence, e.g., a myristilation sequence, a mitochondrial localization sequence, or a nuclear localization sequence, that directs the hydrolase fragment, for example, a fusion protein, to a particular location. The protein of interest, which is fused to the hydrolase fragment, may be a fragment of a wild-type protein, e.g., a functional or structural domain of a protein, such as a domain of a kinase, a transcription factor, and the like. The protein of interest may be fused to the N-terminus or the C-terminus of the fragment (e.g., portion of a spHT). In one embodiment, the fusion protein comprises a protein of interest at the N-terminus, and another protein, e.g., a different protein, at the C-terminus, of the fragment (e.g., portion of a spHT). For example, the protein of interest may be an antibody. Optionally, the proteins in the fusion are separated by a linker, e.g., a linker sequence of 1-20 amino acids (e.g., 1, 2, 3, 4, 5, 6, 7, 8, 9, 10, 11, 12, 13, 14, 15, 16, 17, 18, 19, and 20 acid residues). In some embodiments, the presence of a linker in a fusion protein of the invention does not substantially alter the function of either protein in the fusion relative to the function of each individual protein. For any particular combination of proteins in a fusion, a wide variety of linkers may be employed. In one embodiment, the linker is a sequence recognized by an enzyme, e.g., a cleavable sequence, or is a photocleavable sequence.

[0312] Exemplary heterologous sequences include but are not limited to sequences such as those in FRB and FKBP, the regulatory subunit of protein kinase (PKa-R) and the catalytic subunit of protein kinase (PKa-C), a src homology region (SH2) and a sequence capable of being phosphorylated, e.g., a tyrosine containing sequence, an isoform of 14-3-3, e.g., 14-3-3t (see Mils et al., 3100), and a sequence capable of being phosphorylated, a protein having a WW region (a sequence in a protein which binds proline rich molecules (see Ilsley et al., 3102; and Einbond et al., 1996), and a heterologous sequence capable of being phosphorylated, e.g., a serine and/or a threonine containing sequence, as well as sequences in dihydrofolate reductase (DHFR) and gyrase B (GyrB).

[0313] As described throughout, the spHT peptides and polypeptides provided herein find use as portions of fusion proteins with peptides, polypeptides, antibodies, antibody fragments, and proteins of interest. For instance, the invention provides a fusion protein comprising (1) a spHT peptide or polypeptide and (2) amino acid sequences for a protein or peptide of interest, e.g., sequences for a marker protein, e.g., a selectable marker protein, an enzyme of interest, e.g., luciferase, RNasin, RNase, and/or GFP, a nucleic acid binding protein, an extracellular matrix protein, a secreted protein, an antibody or a portion thereof such as Fc, a bioluminescence protein, a receptor ligand, a regulatory protein, a serum protein, an immunogenic protein, a fluorescent protein, a protein with reactive cysteines, a receptor protein, e.g., NMDA receptor, a channel protein, e.g., an ion channel protein such as a sodium-, potassium- or a calcium-sensitive channel protein including a HERG channel protein, a membrane protein, a cytosolic protein, a nuclear protein, a structural protein, a phosphoprotein, a kinase, a signaling protein, a metabolic protein, a mitochondrial protein, a receptor associated protein, a fluorescent protein, an enzyme substrate, e.g., a protease substrate, a transcription factor, a protein destabilization sequence, or a transporter protein, e.g., EAAT1-4 glutamate transporter, as well as targeting signals, e.g., a plastid targeting signal, such as a mitochondrial localization sequence, a nuclear localization signal or a myristilation sequence, that directs the fusion to a particular location.

[0314] In some embodiments, a fusion protein includes (1) spHT peptide or polypeptide and (2) a protein that is associated with a membrane or a portion thereof, e.g., targeting proteins such as those for endoplasmic reticulum targeting, cell membrane bound proteins, e.g., an integrin protein or a domain thereof such as the cytoplasmic, transmembrane and/or extracellular stalk domain of an integrin protein, and/or a protein that links the mutant hydrolase to the cell surface, e.g., a glycosylphosphoinositol signal sequence.

[0315] Fusion partners may include those having an enzymatic activity. For example, a functional protein sequence may encode a kinase catalytic domain (Hanks and Hunter, 1995), producing a fusion protein that can enzymatically add phosphate moieties to particular amino acids, or may encode a Src Homology 2 (SH2) domain (Sadowski et al., 1986; Mayer and Baltimore, 1993), producing a fusion protein that specifically binds to phosphorylated tyrosines.

[0316] In some embodiments, a fusion comprises an affinity domain, including peptide sequences that can interact with a binding partner, e.g., such as one immobilized on a solid support, useful for identification or purification. DNA sequences encoding multiple consecutive single amino acids, such as histidine, when fused to the expressed protein, may be used for one-step purification of the recombinant protein by high affinity binding to a resin column, such as nickel sepharose. Exemplary affinity domains include HisV5 (HHHHH) (SEQ ID NO:13), HisX6 (HHHHHH) (SEQ ID NO:3), C-myc (EQKLISEEDL) (SEQ ID NO:4), Flag (DYKDDDDK) (SEQ ID NO:5), SteptTag (WSHPQFEK) (SEQ ID NO:6), hemagluttinin, e.g., HA Tag (YPYDVPDYA) (SEQ ID NO:7), GST, thioredoxin, cellulose binding domain, RYIRS (SEQ ID NO:8), Phe-His-His-Thr (SEQ ID NO:9), chitin binding domain, S-peptide, T7 peptide, SH2 domain, C-end RNA tag, WEAAAREACCRECCARA (SEQ ID NO:10), metal binding domains, e.g., zinc binding domains or calcium binding domains such as those from calcium-binding proteins, e.g., calmodulin, troponin C, calcineurin B, myosin light chain, recoverin, S-modulin, visinin, VILIP, neurocalcin, hippocalcin, frequenin, caltractin, calpain large-subunit, S100 proteins, parvalbumin, calbindin D_{9K}, calbindin D_{28K}, and calretinin, inteins, biotin, streptavidin, MyoD, Id, leucine zipper sequences, and maltose binding protein.

[0317] In some embodiments, a split hydrolase fragment described herein (e.g., spHT) is fused to a reporter protein. In some embodiments, the reporter is a bioluminescent reporter (e.g., expressed as a fusion protein with the spHT). In certain embodiments, the bioluminescent reporter is a luciferase. In some embodiments, a luciferase is selected from those found in Omphalotus olearius, fireflies (e.g., Photinini), Renilla reniformis, Aequoria, mutants thereof, portions thereof, variants thereof, and any other luciferase enzymes suitable for the systems and methods described herein. In some embodiments, the bioluminescent reporter is a modified, enhanced luciferase enzyme from Oplophorus (e.g., NANOLUC enzyme from Promega Corporation, SEQ ID NO: 3 or a sequence with at least 70% identity (e.g., >70%, >80%, >90%, >95%) thereto). Exemplary bioluminescent reporters are described, for example, in U.S. Pat. App. No. 2010/0281552 and U.S. Pat. App. No. 2012/0174242, both of which are herein incorporated by reference in their entireties.

[0318] In some embodiments, a split hydrolase fragment described herein (e.g., spHT) is fused to a peptide or polypeptide component of a commercially available NanoLuc®-based technologies (e.g., NanoLuc® luciferase, NanoBiT, NanoTrip, NanoBRET, etc.). PCT Appln. No. PCT/US2010/033449, U.S. Pat. No. 8,557,970, PCT Appln. No. PCT/2011/059018, and U.S. Pat. No. 8,669,103 (each of which is herein incorporated by reference in their entirety and for all purposes) describe compositions and methods comprising bioluminescent polypeptides that find use as heterologous sequences in the fusions herein. Such polypeptides find use in embodiments herein and can be used in conjunction with the compositions and methods described herein. PCT Appln. No. PCT/US14/26354 and U.S. Pat. No. 9,797,889 (each of which is herein incorporated by reference in their entirety and for all purposes) describe compositions and methods for the assembly of bioluminescent complexes; such complexes, and the peptide and polypeptide components thereof, find use as heterologous sequences in embodiments herein and can be used in conjunction with the compositions and methods described herein. In some embodiments, NanoBiT and other related technologies utilize a peptide component and a polypeptide component that, upon assembly into a complex, exhibit significantly-enhanced (e.g., 2-fold, 5-fold, 10-fold, 10²-fold, 10³-fold, 10⁴-fold, or more) luminescence in the presence of an appropriate substrate (e.g., coelenterazine or a coelenterazine analog) when compared to the peptide component and polypeptide component alone. In some embodiments, the NanoBiT peptides and polypeptides are fused to spHT fragments herein. U.S. Pat. Pub. 2020/0270586 and Intl. App. No. PCT/US19/36844 (herein incorporated by reference in their entireties and for all purposes) describe multipartite luciferase complexes (e.g., NanoTrip) that find use as heterologous sequences in embodiments herein and can be used in conjunction with the compositions and methods described herein.

[0319] In some embodiments, a sp dehalogenase finds use with a split reporter. In some embodiments, the fragments of a sp dehalogenase are tethered (e.g., fused, linked, etc.) to the fragments of a split reporter. Upon binding of the two entities, an active dehalogenase and an active reporter are formed. Examples of split fluorescent protein reporters include split GFP and split mCherry. In other embodiments, a first fragment of a split reporter (e.g., split fluorescent protein, split luciferase, etc.) is fused to a first fragment of a sp dehalogenase and a second fragment of the split reporter is linked to a haloalkane substrate. In such embodiments, upon formation of the active dehalogenase complex, the complex binds to the haloalkane substrate and the active reporter complex is assembled. In some embodiments, the fragments of a sp dehalogenase and/or a haloalkane are fused to other split proteins, such as split TEV protease or other enzymes.

[0320] We also envision our split HaloTag fragments being used in “dual tag” configurations, where split fragments of HaloTag are combined with split fragments of luciferases, fluorescent proteins, or other labeling/reporters (including SpyCatcher). For example, a HiBiT-spHaloTag fragment tag, or a GFP11-spHaloTag fragment tag. More broadly, there are split versions of other enzyme classes, such as split TEV protease, which could be created in these “dual tag” configurations as well.

[0321] As described herein, the spHT systems herein utilize haloalkane substrates. In some embodiments, the substrate is of formula (I): R-linker-A-X, wherein R is a solid surface, one or more functional groups, or absent, wherein the linker is a multiatom straight or branched chain including C, N, S, or O, or a group that comprises one or more rings, e.g., saturated or unsaturated rings, such as one or more aryl rings, heteroaryl rings, or any combination thereof, wherein A-X is a substrate for a dehalogenase, hydrolase, HALOTAG, or a spHT system herein (e.g., wherein A is (CH₂)₄₋₂₀ and X is a halide (e.g., Cl or Br)). Suitable substrates are described, for example, in U.S. Pat. Nos. 11,072,812; 11,028,424; 10,618,907; and 10,101,332; incorporated by reference in their entireties.

[0322] In some embodiments, R is one or more functional groups (such as a fluorophore, biotin, luminophore, or a fluorogenic or luminogenic molecule). Exemplary functional groups for use in the invention include, but are not limited to, an amino acid, protein, e.g., enzyme, antibody or other immunogenic protein, a radionuclide, a nucleic acid molecule, a drug, a lipid, biotin, avidin, streptavidin, a magnetic bead, a solid support, an electron opaque molecule, chromophore, MRI contrast agent, a dye, e.g., a xanthene dye, a calcium sensitive dye, e.g., 1-[2-amino-5-(2,7-dichloro-6-hydroxy-3-oxy-9-xanthenyl)-phenoxy]-2-(2′-am-ino-5′-methylphenoxy)ethane-N,N,N′,N′-tetraacetic acid (Fluo-3), a sodium sensitive dye, e.g., 1,3-benzenedicarboxylic acid, 4,4′-[1,4,10,13-tetraoxa-7,16-diazacyclooctadecane-7,16-diylbis(5-methoxy-6,2-benzofurandiyl)]bis (PBFI), a NO sensitive dye, e.g., 4-amino-5-methylamino-2′,7′-difluorescein, or other fluorophore. In one embodiment, the functional group is an immunogenic molecule, i.e., one which is bound by antibodies specific to that molecule.

[0323] In some embodiments, substrates of the invention are permeable to the plasma membranes of cells (i.e., capable of passing from the exterior of a cell (e.g., eukaryotic, prokaryotic) to the cellular interior without chemical, enzymatic, or mechanical disruption of the cell membrane).

[0324] In some embodiments, substrates herein comprise a cleavable linker, for example, those described in U.S. Pat. No. 10,618,907; incorporated by reference in its entirety.

[0325] In some embodiments, a substrate comprises a fluorescent functional group (R). Suitable fluorescent functional groups include, but are not limited to: stilbazolium derivatives (Marquesa et al. Mechanism-Based Strategy for Optimizing HaloTag Protein Labeling. ChemRxiv. Cambridge: Cambridge Open Engage; 2021; incorporated by reference in its entirety), xanthene derivatives (e.g., fluorescein, rhodamine, Oregon green, eosin, Texas red, etc.), cyanine derivatives (e.g., cyanine, indocarbocyanine, oxacarbocyanine, thiacarbocyanine, merocyanine, etc.), naphthalene derivatives (e.g., dansyl and prodan derivatives), oxadiazole derivatives (e.g., pyridyloxazole, nitrobenzoxadiazole, benzoxadiazole, etc.), pyrene derivatives (e.g., cascade blue), oxazine derivatives (e.g., Nile red, Nile blue, cresyl violet, oxazine 170, etc.), acridine derivatives (e.g., proflavin, acridine orange, acridine yellow, etc.), arylmethine derivatives (e.g., auramine, crystal violet, malachite green, etc.), tetrapyrrole derivatives (e.g., porphin, phtalocyanine, bilirubin, etc.), CF dye (Biotium), BODIPY (Invitrogen), ALEXA FLOUR (Invitrogen), DYLIGHT FLUOR (Thermo Scientific, Pierce), ATTO and TRACY (Sigma Aldrich), FluoProbes (Interchim), DY and MEGASTOKES (Dyomics), SULFO CY dyes (CYANDYE, LLC), SETAU AND SQUARE DYES (SETA BioMedicals), QUASAR and CAL FLUOR dyes (Biosearch Technologies), SURELIGHT DYES (APC, RPE, PerCP, Phycobilisomes)(Columbia Biosciences), APC, APCXL, RPE, BPE (Phyco-Biotech), autofluorescent proteins (e.g., YFP, RFP, mCherry, mKate), quantum dot nanocrystals, etc.

[0326] In some embodiments, a substrate comprises a fluorogenic functional group (R). A fluorogenic functional group is one that produces and enhanced fluorescent signal upon binding of the substrate to a target (e.g., binding of a haloalkane to a modified dehalogenase). By producing significantly increased fluorescence (e.g., 10×, 31×, 50×, 100×, 310×, 500×, 100×, or more) upon target engagement, the problem of background signal is alleviated. Exemplary fluorogenic dyes for use in embodiments herein include the JANELIA FLUOR family of fluorophores, such as:

[chemical structure]

(see, e.g., U.S. Pat. Nos. 9,933,417; 10,018,624; 10,161,932; and 10,495,632; each of which is incorporated by reference in their entireties). In some embodiments, exemplary conjugates of JANELIA FLUOR 549 and JANELIA FLUOR 646 with haloalkane substrates for modified dehalogenase (e.g., HALOTAG) are commercially available (Promega Corp.). The use and design of fluorogenic functional groups, dyes, probes, and substrates is described in, for example, Grimm et al. Nat Methods. 3117 October; 14(10):987-994.; Wang et al. Nat Chem. 3120 February; 12(2):165-172; incorporated by reference in their entireties.

[0327] In some embodiments, ‘dual warhead’ substrates are provided that comprise a haloalkane moiety (e.g., a substrate for a modified dehalogenase (e.g., HALOTAG)) and a dimerization moiety that is a ligand (or capture element) for a second binding protein (capture element). For example, certain embodiments herein utilize a haloalkane linked to a SNAP-tag ligand (FIG. 15A; Cermakova & Hodges. Molecules 2018, 23(8), 1958; incorporated by reference in its entirety); a haloalkane linked to cTMP (FIG. 15B; Cermakova & Hodges. Molecules 2018, 23(8), 1958; incorporated by reference in its entirety)); a haloalkane linked to rapamycin-like moiety capable of binding to FKBP or FRB (Chen et al. ACS Chem. Biol. 2021, 16, 12, 2808-2815; incorporated by reference in its entirety); or other haloalkane ‘dual warhead’ ligands capable of binding to a modified dehalogenase (e.g., HALOTAG) and a second capture agent. In such embodiments, a system is provided comprising a split modified dehalogenase (spHT), a dual warhead substrate, and a capture agent capable of binding to the dimerization moiety (e.g., FKBP, FRB, SNAP-tag, eDHFR, etc.). In some embodiments, the capture agent and/or one or both fragments of the split modified dehalogenase (spHT) are provided as fusions with proteins of interest. In some embodiments, the dual warhead ligand triggers dimerization of (1) a split modified dehalogenase (spHT) and any elements bound or fused thereto with (2) the capture agent any elements bound or fused thereto. By adding another protein binding small molecule moiety onto a haloalkane, the dual warheads trigger close proximity of fusion partners to the split modified dehalogenase (spHT) and the capture agent. In some embodiments, a cell comprises two proteins of interest, one tagged by a fragment of a split modified dehalogenase (spHT) and the other tagged with a capture agent; in the presence of a dual warhead ligand comprising a haloalkane and a capture element for the capture agent, the tags dimerize and position the fused proteins of interest into close proximity. Such embodiments provide forced proximity of fusion partners to these proteins in the cell and control the timing and extent of their colocalization through the addition of the dual warhead ligand. Any suitable linkers may find use in assembly of dual warhead substrates. The linker may include various combinations of such groups to provide linkers having ester (—C(O)O—), amide (—C(O)NH—), carbamate (—NHC(O)O—), urea (—NHC(O)NH—), phenylene (e.g., 1,4-phenylene), straight or branched chain alkylene, and/or oligo- and poly-ethylene glycol (—(CH₂CH₂O)ₓ—) linkages, and the like. In some embodiments, the linker may include 2 or more atoms (e.g., 2-200 atoms, such as 1, 2, 3, 4, 5, 6, 7, 8, 9, 10, 11, 12, 13, 14, 15, 16, 17, 18, 19, 20, 25, 30, 35, 40, 45, 50, 55, 60, 65, 70, 75, 80, 85, 90, 95, 100, 110, 120, 130, 140, 150, 160, 170, 180, 190, or 200 atoms, or any range therebetween (e.g., 2-20, 5-10, 15-35, 25-100, etc.)). In some embodiments, the linker includes a combination of oligoethylene glycol linkages and carbamate linkages. In some embodiments, the linker has a formula —O(CH₂CH₂O)_{z1}—C(O)NH—(CH₂CH₂O)_{z2}—C(O)NH—(CH₂)_{z3}—(OCH₂CH₂)_{z4}O—, wherein z1, z2, z3, and z4 are each independently selected form 0, 1, 2, 3, 4, 5, and 6. For example, in some embodiments, the linker has a formula selected from:

[chemical structure]

[0328] In some embodiments, a dual warhead that finds use in embodiments herein is a haloalkane linked to a ligand capable of engaging an E3 ubiquitin ligase (e.g., thalidomide, Cereblon E3 ubiquitin ligase, von Hippel-Lindau (VHL) E3 ligase or any other E3 ubiquitin ligase), otherwise known as a proteolysis targeting chimera (PROTAC). The haloalkane PROTAC is capable of binding to a modified dehalogenase or modified dehalogenase complex and an E3 ubiquitin ligase; recruitment of the E3 ligase results in ubiquitination and subsequent degradation via the proteasome of the to the modified dehalogenase (complex) and any protein components (e.g., a target protein) fused thereto. In some embodiments, the split dehalogenase systems herein find use in assays/systems to measure the kinetics of target protein ubiquitination or, in an endpoint format, for applications such as measuring compound dose-response curves. For example, in some embodiments, a target protein is expressed/provided in a sample as a fusion with a first component fragment of a split modified dehalogenase (e.g., spHT); the sample is contacted with a PROTAC of a haloalkane and a ligand capable of engaging an E3 ubiquitin ligase (e.g., thalidomide, Cereblon E3 ubiquitin ligase, von Hippel-Lindau (VHL) E3 ligase or any other E3 ubiquitin ligase); upon addition of a second component fragment of the split modified dehalogenase (e.g., spHT), the active modified dehalogenase complex is formed, the haloalkane is bound by the complex bringing the ligand in proximity of the target protein, resulting in ubiquitination and directing the fusion target to the proteasome for degradation.

[0329] In some embodiments, the components of the split dehalogenase have high affinity for one another, and therefore the split dehalogenase complex forms when the two components are in proximity to each other. The high affinity for the components of the split modified dehalogenase drives the formation of the split dehalogenase complex and the degradation of the target protein. In such embodiments, the second component could be added to the system at a specified time to induce degradation, could be localized to a specific location or compartment (e.g., cell type, organelle, tissue, etc.) where degradation will occur, or could conditionally expressed. In other embodiments, the components of the split dehalogenase have low affinity for one another, and a second interaction is required to induce the formation of the split dehalogenase complex. For example, the second component of the split dehalogenase is fused to a protein that binds the target protein or is tethered to a ligand for the target protein. Binding of this component to the target proteins allows formation of the split dehalogenase complex, which can in turn bind the haloalkane of the PROTAC and induce degradation.

[0330] In related embodiments, a target protein is expressed/provided in a sample as a fusion with (i) a first component fragment of a split modified dehalogenase (e.g., spHT) and (ii) a first interacting protein; the sample is contacted with a proteolysis targeting chimera (PROTAC) of a haloalkane and a ligand capable of engaging an E3 ubiquitin ligase (e.g., thalidomide); upon addition of a fusion of the second component fragment of the split modified dehalogenase (e.g., spHT) and a second interacting protein, the active modified dehalogenase complex is formed (facilitated by binding of the first and second interacting proteins), the haloalkane is bound by the complex bringing the ligase in proximity of the target protein, resulting in ubiquitination and directing the fusion target to the proteasome for degradation. In other embodiments, the complex formation and subsequent degradation is monitored by fluorescence, bioluminescence, and/or BRET. For example, in certain embodiments, a target protein is expressed/provided in a sample as a fusion with a luciferase (e.g., NANOLUC) or a component of a bioluminescent complex (e.g., a component of the NANOBIT system); a first component fragment of a split modified dehalogenase (e.g., spHT) is expressed/provided as a fusion with ubiquitin or an E3 ubiquitin ligase (e.g., thalidomide, Cereblon E3 ubiquitin ligase, von Hippel-Lindau (VHL) E3 ligase or any other E3 ubiquitin ligase); the sample is contacted with bifunctional ligand comprising a haloalkane and a molecule capable of binding to the target protein; upon addition of a second component fragment of the split modified dehalogenase (e.g., spHT) with high affinity of the first component fragment, the active modified dehalogenase complex is formed, the haloalkane is bound by the complex bringing the ubiquitin in proximity of the target protein, resulting in ubiquitination, directing the target to the proteasome for degradation, and extinguishing the signal from the luciferase. In similar embodiments, a component of the split modified dehalogenase is tethered to a fluorophore, such that BRET between the target fusion and the split modified dehalogenase can be used to monitor the system.

[0331] In other embodiments, a targeting chimera (TAC) system may utilize a haloalkane linked to a detectable moiety to monitor the system, rather than as a functional component of the system. For example, a first component of the modified dehalogenase is fused to ubiquitin, a second component of the modified dehalogenase (e.g., with low affinity for the first component) is fused to a target protein, and a haloalkane is linked to a fluorophore or other detectable moiety. Upon ubiquitin being brought into proximity of the target protein, the modified dehalogenase complex is forming, the haloalkane is bound, and the complex is labelled with the detectable moiety.

[0332] In some embodiments, split dehalogenase systems herein find use in various other targeting chimera (TAC) systems, such as: phosphorylation targeting chimera (PhosTAC; Chen et al. ACS Chem. Biol. 3121, 16, 12, 2808-2815; incorporated by reference in its entirety) systems, deubiquitinase targeting chimera (DUBTAC; Henning et al. Deubiquitinase-Targeting Chimeras for Targeted Protein Stabilization. bioRxiv; 2021. DOI: 10.1101/2021.04.30.441959; incorporated by reference in its entirety) systems, lysosome-targeting chimaera (LyTAC; Banik et al. Nature 584, 291-297 (2020); incorporated by reference in its entirety) systems, autophagy-targeting chimera (AUTAC; Takahashi et al. Mol Cell. 2019 Dec. 5; 76(5):797-810.e10; incorporated by reference in its entirety) systems, autophagy-tethering compound (ATTEC; Fu et al. Cell Research volume 31, pages 965-979 (2021); incorporated by reference in its entirety) systems, and oligo-based TACs. Dual warheads comprising a haloalkane and a ligand for any of the above TAC system may find use in embodiments herein. For example, PhosTACs are similar to the well-described PROTACs in their ability to induce ternary complexes, PhosTACs focus on recruiting a Ser/Thr phosphatase to a phosphosubstrate to mediate its dephosphorylation. PhosTACs extend the use of PROTAC technology beyond protein degradation via ubiquitination to also other protein post-translational modifications. For example, in some embodiments, a target protein is expressed/provided in a sample as a fusion with a first component fragment of a split modified dehalogenase (e.g., spHT); the sample is contacted with a phosphorylation targeting chimera (PhosTAC) of a haloalkane and a ligand capable of engaging an phosphatase enzyme; upon addition of a second component fragment of the split modified dehalogenase (e.g., spHT) with high affinity of the first component fragment, the active modified dehalogenase complex is formed, the haloalkane is bound by the complex bringing the ligand in proximity of the target protein, resulting in phosphorylation of the target protein.

[0333] In some embodiments, split dehalogenase systems herein find use is other targeting chimera systems in which a dual function ligand comprising a haloalkane and a ligand for a recruitable enzyme is used in combination with a fusion of a target protein and a fragment of a spHT to induce the enzymatic activity of the recruitable enzyme to the target protein upon introduction of the second high affinity spHT fragment to the system.

[0334] Systems and methods comprising any combinations of the above TAC systems/assays are within the scope herein.

[0335] In some embodiments, provided herein are isolated nucleic acid molecules (polynucleotides) comprising a nucleic acid sequence encoding a split hydrolase (e.g., spHT) fragments described herein. In some embodiments, such polynucleotides contain an open reading frame encoding a spHT or fragment thereof. In some embodiments, such polynucleotides are within an expression vector or integrated into the genomic material of a cell. In some embodiments, such polynucleotides further comprise regulatory elements such as a promotor. Further provided is an isolated nucleic acid molecule comprising a nucleic acid sequence encoding a fusion protein comprising a sp hydrolase fragment (e.g., spHT, etc.) and one or more amino acid residues at the N-terminus (a N-terminal fusion partner) and/or C-terminus (a C-terminal fusion partner). In one embodiment, the fusion protein comprises at least two different fusion partners (e.g., as described herein), one at the N-terminus and another at the C-terminus, where one of the fusions may be a sequence used for purification, e.g., a glutathione S-transferase (GST) or a polyHis sequence, a sequence intended to alter a property of the remainder of the fusion protein, e.g., a protein destabilization sequence, or a sequence which has a property which is distinguishable. In one embodiment, the isolated nucleic acid molecule comprises a nucleic acid sequence, which is optimized for expression in at least one selected host. Optimized sequences include sequences, which are codon optimized, i.e., codons that are employed more frequently in one organism relative to another organism, e.g., a distantly related organism, as well as modifications to add or modify Kozak sequences and/or introns, and/or to remove undesirable sequences, for instance, potential transcription factor binding sites. In one embodiment, the polynucleotide includes a nucleic acid sequence encoding a fragment of dehalogenase, which nucleic acid sequence is optimized for expression in a selected host cell. In one embodiment, the optimized polynucleotide no longer hybridizes to the corresponding non-optimized sequence, e.g., does not hybridize to the non-optimized sequence under medium or high stringency conditions. In another embodiment, the polynucleotide has less than 90%, e.g., less than 80%, nucleic acid sequence identity to the corresponding non-optimized sequence and optionally encodes a polypeptide having at least 80%, e.g., at least 85%, 90% or more, amino acid sequence identity with the polypeptide encoded by the non-optimized sequence.

[0336] Constructs, e.g., expression cassettes, and vectors comprising the isolated nucleic acid molecule, as well as host cells having one or more of the constructs, and kits comprising the isolated nucleic acid molecule, one or more constructs or vectors are also provided. Host cells include prokaryotic cells or eukaryotic cells such as a plant or vertebrate cells, e.g., mammalian cells, including but not limited to a human, non-human primate, canine, feline, bovine, equine, ovine or rodent (e.g., rabbit, rat, ferret, or mouse) cell. In some embodiments, the expression cassette comprises a promoter, e.g., a constitutive or regulatable promoter, operably linked to the nucleic acid molecule. In some embodiments, the expression cassette contains an inducible promoter. In certain embodiments, the invention includes a vector comprising a nucleic acid sequence encoding a fusion protein comprising a fragment of a dehalogenase. In some embodiments, optimized nucleic acid sequences, e.g., human codon optimized sequences, encoding at least a fragment of the hydrolase, and preferably the fusion protein comprising the fragment of a hydrolase, are employed in the nucleic acid molecules of the invention. The optimization of nucleic acid sequences is known to the art, see, for example WO 02/16944; incorporated by reference in its entirety.

[0337] Also provided are cells comprising the split hydrolase fragment(s) (e.g., spHT), polynucleotides, expression vector, etc. herein. In some embodiments, a component described herein is expressed within a cell. In some embodiments, a component herein is introduced to a cell, e.g., via transfection, electroporation, infection, cell fusion, or any other means.

[0338] In some embodiments, a system herein (e.g., comprising a sp hydrolase (e.g., spHT, etc.) may be employed to measure or detect various conditions and/or molecules of interest. For instance, protein-protein interactions are essential to virtually all aspects of cellular biology, ranging from gene transcription, protein translation, signal transduction and cell division and differentiation. Protein complementation assays (PCA) are one of several methods used to monitor protein-protein interactions. In PCA, protein-protein interactions bring two non-functional halves of an enzyme physically close to one another, which allows for re-folding into a functional enzyme. Interactions are therefore monitored by enzymatic activity. In protein complementation labeling (PCL), a covalent bond is created between the substrate and the complex resulting in cumulative labeling over time, thus increasing sensitivity for the detection of weak and/or rare protein-protein interactions. In a typical split enzyme system, if the complementation is disrupted, the signal generation is lost due to lack of or reduced substrate turnover. However, in a split labeling protein system (e.g., spHaloTag), the covalent nature of the label causes it to be retained on the split protein even after the complementation is disrupted. The demonstrated benefit of the latter is that for very low abundance, but regularly occurring molecular events (like neurotransmitters or hormones binding a receptor), a signal is accumulated over time (covalently) and eventually provides enough signal to detect the events—something that is difficult to do with a split enzyme system due to the rarity of the events leading to low turnover of the enzyme into signal.

[0339] In one embodiment, vectors encoding two complementing fragments of a mutant dehalogenase (e.g., spHT) at least one of which is fused to a protein of interest, or encoding two complementing fragments of a mutant dehalogenase each of which is fused to a protein of interest, are introduced to a cell, cell lysate, in vitro transcription/translation mixture, or supernatant, and a hydrolase substrate (e.g., haloalkane) labeled with a functional group is added thereto. Then the functional group is detected or determined, e.g., at one or more time points and relative to a control sample.

[0340] In some embodiments, provided herein are methods to detect an interaction between two proteins in a sample. The method includes providing a sample having a cell comprising a plurality of expression vectors of the invention, a lysate of the cell, or an in vitro transcription/translation reaction having the plurality of expression vectors of the invention, and a hydrolase substrate (e.g., haloalkane) with at least one functional group under conditions effective to allow for association of the first and second fusion proteins. The presence, amount, or location of the at least one functional group in the sample is detected.

[0341] In some embodiments, the invention provides a method to detect a molecule of interest in a sample. The method includes providing a sample having a cell having a plurality of expression vectors of the invention, a lysate thereof, an in vitro transcription/translation reaction having the plurality of expression vectors of the invention, and a hydrolase substrate (e.g., haloalkane) with at least one functional group under conditions effective to allow the first heterologous amino acid sequence to interact with a molecule of interest in the sample. The presence, amount, or location of the at least one functional group in the sample is detected, thereby detecting the presence, amount, or location of the molecule of interest.

[0342] Also provided herein are methods to detect an agent that alters the interaction of two proteins, which includes providing a sample having a cell comprising a plurality of expression vectors of the invention, a lysate thereof, or an in vitro transcription/translation reaction having a plurality of expression vectors of the invention, a hydrolase substrate (e.g., haloalkane) with at least one functional group, and an agent under conditions effective to allow for association of the first and second fusion proteins. The agent is suspected of altering the interaction of the first and second heterologous amino acid sequences. The presence or amount of the at least one functional group in the sample relative to a sample without the agent is detected.

[0343] In another embodiment, the invention provides a method to detect an agent that alters the interaction of a molecule of interest and a protein. The method includes providing a sample having a cell comprising a plurality of expression vectors of the invention, a lysate thereof, or an in vitro transcription/translation reaction having the plurality of expression vectors of the invention, a hydrolase substrate (e.g., haloalkane) with at least one functional group, and an agent suspected of altering the interaction between the heterologous amino acid sequence and a molecule of interest in the sample. The presence or amount of the functional group in the sample relative to a sample with the agent.

[0344] In some embodiments, provided herein are methods of detecting the presence of a molecule of interest. For instance, a cell is contacted with vectors comprising a promoter, e.g., a regulatable promoter, and a nucleic acid sequence encoding the two complementary fragments of a mutant hydrolase, at least one of which is fused to a protein which interacts with the molecule of interest. In one embodiment, a transfected cell is cultured under conditions in which the promoter induces transient expression of the fragments or regulated expression of one of the fragments and an activity associated with the labeled substrate is detected.

[0345] In some embodiments, a system herein (e.g., comprising a sp hydrolase (e.g., spHT, etc.) may be employed as a biosensor to detect the presence/amount of a molecule or interest or a particular condition (e.g., pH or temperature). Upon interacting with a molecule of interest or being subject to certain conditions, the biosensor undergoes a conformational change or is chemically altered which causes an alteration in activity. In some embodiments, a sp hydrolase herein comprises an interaction domain for a molecule of interest. For example, the biosensor could be generated to detect proteases (such as one to detect the presence of a particular viral protease, which in turn is indicator of the presence of the virus), kinases (for example, by inserting a kinase site into a reporter protein), RNAi (e.g., by inserting a sequence suspected of being recognized by RNAi into a coding sequence for a reporter protein, then monitoring reporter activity after addition of RNAi), a ligand, a binding protein such as an antibody, cyclic nucleotides such as cAMP or cGMP, or a metal such as calcium, by insertion of a suitable sensor region into the sp hydrolase (e.g., spHT, etc.). One or more sensor regions can be inserted at the C-terminus, the N-terminus, and/or at one or more suitable location in the sp hydrolase sequence, wherein the sensor region comprises one or more amino acids. One or all of the inserted sensor regions may include linker amino acids to couple the sensor to the remainder of the polypeptide. Examples of biosensors are disclosed in U.S. Pat. Appl. Publ. Nos. 2005/0153310 and 2009/0305280 and PCT Publ. No. WO 2007/120522 A2, each of which is incorporated by reference herein.

### EXPERIMENTAL

### Example 1

### Comprehensive Screen of Circular Dehalogenase Permutants

[0346] Plasmids encoding all possible circularly permuted versions of HaloTag, along with two linker control versions of non-permuted HaloTag with the linker simply appended the N- or C-terminus, were constructed by PCR, for a total of 298 gene constructs. The linker connecting the native N- and C-terminus was GSSGGGSSGGEPTTENLYFQ/SDNGSSGGGSSGG (TEV protease recognition sequence underlined, cleavable peptide bond indicated by slash). Expression was performed in E. coli, and cell lysates were prepared by addition of a chemical lysis reagent. Lysates were treated with TEV protease (or water as a negative control) and subjected to a panel of biochemical tests.

[0347] Lysates were assayed for protein solubility by centrifugation, followed by conjugation with 10 μM CA-TMR ligand and gel electrophoresis. To determine the thermal stability of each cpHT, lysates were heated to 40-90° C. for 30 min and cooled to room temperature, after which they were mixed with 10 nM CA-TMR and subject to fluorescence polarization (FP) measurements. Enzyme activity was measured quantitatively by mixing lysates with 10 nM CA-AlexaFluor488 and monitoring their FP change over 30 min.

[0348] This screen revealed that 228/296 (77%) of cpHT variants reacted with CA-TMR, with the majority of these being soluble, and 50 variants had at least 10% of native HT activity on CA-AlexaFluor488 (FIG. 1). Seventeen cpHT variants had increased thermal stability relative to HT, and 38 variants exhibited activity recovery after thermal denaturation, presumably by protein refolding. The most active variants by Alexa Fluor488 velocity clustered in a region distal from the lid domain, but this effect may be particular to this substrate, which is negatively-charged and may be sensitive to lid domain perturbations. Indeed, when using the neutral TMR ligand in the solubility and stability assays, the clustering effect was less apparent. With the exception of cpHTs near residue 111 and 120, all the refolding variants were localized to the lid domain, and all the thermostabilized variants were also in the lid domain.

### Example 2

### Testing of Split Dehalogenase Variants

[0349] Selection of Candidates for spHT Screen from Comprehensive cpHT Screen

[0350] After completing the screen of all 298 possible circular permutants of HaloTag (cpHT) (See Example 1), 22 split sites were selected for testing as split HaloTag fragment pairs (spHT). Candidate spHT designs were selected based on characteristics of their cpHT counterparts, including thermal stability, expression, enzyme activity, and changes in biophysical properties upon cleavage of the TEV protease recognition sequence in the linker connecting the natural N- and C-termini. Particular interest was paid to variants which, upon TEV protease cleavage of the cpHT forms, exhibited the ability to renature, or refold, after thermal denaturation (e.g., circular permutants in the sequence region near residue 120).

Expression of spHT Fragments as Insoluble Fusions to Various Tags

[0351] An initial set of spHT N- and C-terminal fragments (spHT 80, 97, and 121) was expressed in E. coli as fusions to several different domains, including maltose-binding protein (MBP), a 6×-polyhistidine tag (His-tag), the large and small components of the bimolecular NanoBiT system (LgBiT and SmBiT). While moderate expression was noted for several of these fusions, all suffered from low solubility. The low solubility was attributed to the exposure of core hydrophobic residues, normally buried in the complete HT structure, which form aggregation-prone surfaces on the spHT fragments. Estimates based on NanoLuc activity place the solubility of these fragments at <5% in E. coli lysates.

Characterization of spHT Variants by Chemically-Induced Dimerization of FRB/FKBP Fusions

[0352] Despite low solubility, all 22 exemplary spHT designs were produced as fusions to FRB and FKBP domains. FRB and FKBP undergo chemically-induced, high-affinity heterodimerization in the presence of rapamycin; thus, spHT fragments fused to these domains can be brought into close proximity with one another by the addition of rapamycin, providing an assay for functional reconstitution of HaloTag enzyme activity. Each of the spHT fragments was fused (n=44) to FRB or FKBP, at either the N- or C-terminus, to generate a total of 176 unique fusion proteins and expressed in E. coli. Since the best orientation of FRB and FKBP relative to the spHT fragment domains cannot be predicted ab initio, all possible orientations and combinations were assayed (eight per spHT site). Fusion combinations were assayed using the fluorogenic JaneliaFluor 646 (JF646) ligand, in the presence of 50 nM rapamycin. JF646 was selected because it is available through the regular Promega catalog, has low background fluorescence (which enables direct fluorescence measurements in 96-well plates), and offers a higher stringency test than non-fluorogenic ligands (like TMR).

[0353] Six out of 22 spHT FRB/FKBP designs exhibited ≥2-fold fluorescence signal increase in the presence of rapamycin (spHT 80, 133, 145, 157, 180, and 195), with up to 4.7-fold induction noted for the combination of [1-195]-FKBP+[196-297]-FRB (FIG. 2). The corresponding cpHT 195 was the most thermostable of all variants in the circular permutation screen (at around 7° C. higher Tₘ than HT). All but one spHT hit (spHT 80) were located in the lid subdomain of HT, which comprises the region of the sequence covering residues 133-216. Among the spHT hits, there were multiple orientations of FRB and FKBP that allowed reconstitution of activity. Generally, fusion combinations in which FKBP was at the C-terminus of either fragment performed the best.

[0354] In addition to blunt spHT fragment combinations (in which all HT residues are present exactly once), several “gapped” combinations (e.g., having deletions relative to a parent sequence) and “overlapped” combinations (e.g., having duplications relative to a parent sequence) were tested (in which certain residues were missing from both fragments or present on both fragments, respectively). The missing or double-represented residues in these combinations were confined to the lid subdomain, specifically, Helix 6, Helix 7, Helix 8, and/or Helix 9. Gapped combinations failed to reconstitute detectable ligand binding activity. Overlapped combinations, however, exhibited reconstitution up to 3-fold over background, (FIG. 3). These results indicate that (a) the lid helices are critical for ligand binding in HT, and (b) the lid subdomain tolerates sequence duplications and may engage in secondary structure swapping, a useful feature for designing biosensors and conformationally dynamic protein switches.

Reversibility of spHT Complementation

[0355] Reversibility is a critical characteristic of bimolecular reporter systems, and experiments were conducted during development of embodiments herein to determine whether the formation of spHT complexes could be reversed, and how this may affect ligand binding and signal dynamics. First, the spHT FRB/FKBP pairs were re-tested with higher concentrations of rapamycin. Several spHT combinations showed sharp increases (up to 5-fold over background) in JF646 fluorescence only when 100 nM or 500 nM rapamycin was added (FIG. 4), indicating that the rapamycin employed in earlier tests may have been insufficient for some spHT designs. spHT 19, 145, 157, 195, and 233 stood out with the highest fold increases in JF646 fluorescence. 500 nM rapamycin was used in subsequent reversibility experiments.

[0356] spHT FRB/FKBP fusion combinations were incubated for 24 h with 500 nM rapamycin, then a 31-fold molar excess (10 uM) of the competitive ligand FK506 was added. 24 h later, JF646 was added and allowed to bind for another 24 h (72 h total time elapsed). spHT 19 had slightly less fluorescence compared to its no-FK506 control, and spHT 157, 195, and 233 had only background levels of fluorescence compared to their no-FK506 controls (FIG. 5). However, spHT 145 fluorescence was not decreased relative to its no-FK506 control. That is, rapamycin caused spHT 145 to form an irreversible complex, spHT 19 to form a semi-reversible complex, and spHT 157, 195, and 233 to form reversible complexes.

[0357] spHT FRB/FKBP fusion combinations were incubated for 24 h with 500 nM rapamycin, 48 h with JF646, then 48 h with 10-fold molar excess of FK506 (FIG. 6). In this case, FK506 failed to reverse the fluorescence development of spHT 19, 145, 157, 195, and 233. That is, JF646 fluorescence did not decrease when the rapamycin was competed out of the FKBP fusion, and the induced dimerization signal was removed. These observations were confirmed using TMR labeling and SDS-PAGE analysis (FIG. 7).

[0358] Taken together, these results demonstrate that some spHT fragments (e.g., split sites 145, 157, 195, etc.) may require long periods of close proximity to form complexes, likely because, as spatially separated entities, they form non-complementary, non-native structures and need time to sample many conformations in the presence of their stabilizing partners. However, experiments conducted during development of embodiments herein have demonstrated with N-terminal splits sites (e.g., splits at 19 or 30) that other spHT fragments form detectable complexes in 30 min or less.; Some spHT variants have high affinity and form irreversible (FK506-resistant) complexes, like spHT 145; other complexes are susceptible to FK506 because of their low affinity, like spHT 157, 195, and 233. Complexes that bind to ligand benefit from further stabilization that renders them FK506-resistant spHT complexes may be reversible in their ligand-free state, but can become irreversible in their ligand-bound state.

Quantitative Reconstitution of spHT 19 by Titration with the Short N-Terminal Fragment

[0359] Based on the sensitivity of spHT to rapamycin concentration, it was predicted that fluorescence would also be sensitive to the ratio of spHT fragment concentrations. spHT 19 was used as a test case because the larger C-terminal fragment possesses measurable background activity, and the smaller N-terminal fragment has appeal as a potential peptide tag. The large C-terminal fragment was held constant in all eight spHT 19 FRB/FKBP fusion combinations, while the concentration of the small N-terminal fragment was varied. It was found that by increasing the N:C ratio from 1.25 to 10, TMR labeling efficiency could be increased by >100% depending on the orientation of FRB and FKBP in the fusions (FIGS. 8 and 12). Likewise, JF646 fluorogenic signal could be increased by up to ˜25% at a N:C ratio of 10 (FIG. 10). The greater responsiveness observed in TMR labeling is likely because under the TMR labeling conditions (10 μM substrate), labeling is limited by spHT complex concentration, while under the JF646 labeling conditions (0.1 μM substrate), the substrate concentration is the limiting factor.

[0360] These results indicate that the larger C-terminal fragment of spHT can serve as a quantitative, integrated sensor of the smaller N-terminal fragment in the presence of ample ligand and a high affinity partner interaction, such as the FRB-rapamycin-FKBP interaction.

Expression and Activity of spHT Variants in Mammalian Cells

[0361] A small subset of spHT variants (spHT 145, 157, and 195) were selected for expression in mammalian cells (HeLa cells). Cells were co-transfected with pF4Ag shuttle vectors encoding spHT fragments as fusions to FKBP and FRB, with FKBP appended to the C-terminal of the first fragment and FRB appended to the C-terminal of the second fragment in each case. HT activity was observed both in lysates (using the non-fluorogenic TMR ligand, FIG. 11) and in live cells (using the fluorogenic JF646 and JF585 ligands, FIG. 12) for all spHT co-transfectants. Activity was visible even in the absence of rapamycin. While the addition of 50 nM rapamycin increased JF646 and JF585 fluorescence yield in live cells by up to ˜2-fold, it had no apparent effect on band intensity in TMR-labeled SDS-PAGE. That is, TMR labeling occurred equally (and significantly) with or without rapamycin.

[0362] Similar results were obtained with overlapped spHT combinations in HeLa cells (FIGS. 13 and 14). These results indicate that (a) co-expression of spHT fragments allows the fragments to spontaneously complement in a manner not observed during independent expression and subsequent mixing, indicative of possible co-translational folding; (b) in such pre-assembled spHT complexes, rapamycin can assist the formation of properly folded lid subdomains by stabilizing the interaction of lid helices, or reducing their conformational degrees of freedom; (c) such actions of rapamycin may increase fluorogenic ligand (e.g., JF646 and JF585) signal without increasing total ligand binding (as measured by saturation with TMR ligand), because the total concentration of spHT complexes is not significantly changed.

### Example 3

### Internal Split Sites

[0363] Several split sites located in the lid domain were further examined for complementation as circular permutations that split peptides internally off the lid domain (i.e., removing an internal helix and testing for complementation) including configurations that contained gapped and overlapping residues in the complementing peptides. Since it was previously observed that several circularly permuted HaloTag variants missing residues in the region of 146-195 of the lid domain were expressed and soluble in E. coli, it was tested whether complementation could be observed when residues corresponding to the missing fragments were reintroduced. It was found that Rapamycin-dependent complementation activity could be observed when cpHaloTag missing residues 146-157 (cpHT(A146-157), which lack the Helix 6 of the lid domain) fused to FRB or FKBP was paired with the cognate 146-157 peptide (HT146-157) as fusions to FRB or FKBP (FIG. 16). Complementation was not observed with larger lid domain deletions in the cpHaloTag (cpHTΔ146-180) when attempting to pair with the cognate missing peptide fragment.

[0364] Since the cpHT(Δ146-157) internal deletion fragment was functional when the complementary missing residues were reintroduced as a separate peptide, it was tested whether other peptides comprising various other lid domain residues could show Rapamycin-dependent complementation activity. FIG. 17 shows Rapamycin-induced enhancement of activity when the cpHT(Δ146-157) fragment was paired with the HT(158-180) peptide as fusions to FRB or FKBP. This pair of constructs shares an overlap in the 158-180 residue region and a gap in the 146-157 region of the complex, but was still functional for activity in the assay and responsive to Rapamycin.

[0365] Following the experiments showing that split cpHaloTag variants lacking fragments of the lid domain (specifically Helix 6; residues 146-157) could be complemented with peptides comprising smaller lid domain fragments, either corresponding to the missing residues or those with overlap and gapped configurations, it was tested whether complementation could also occur by donation of lid domain residues through domain swapping. Domain swapping is a phenomenon where two polypeptides exchange similar folded domains that can recapitulate the monomeric structure of each when occurring between the similar (often the same) protein. In the case of HaloTag, it has been shown that its lid subdomain can “swap” among monomers, creating a dimeric structure where each monomer is comprised of its own core a/b-hydrolase domain and its partner's lid domain. Since the function of HaloTag relies on the proper folding of its lid domain to bind the chloroalkane substrate, it was reasoned that cpHaloTag variants lacking fragments of the lid domain could have their activity restored if another cpHaloTag construct could swap or donate the missing residues to form a complete HaloTag structure. In order to detect activity only when domain swapping occurs, the D106A mutation was made in the domain “donor” construct in the pairs shown in FIG. 18. The D106A mutation eliminates covalent attachment of the chloroalkane (so it would not be detected on gels). However, since those mutant cpHaloTag variants still retain their lid domain residues, they are capable of swapping them into the split cpHaloTag variants to complement their missing residues, restore their activity, and subsequently enable labeling with a TMR HaloTag ligand detectable following SDS-PAGE. FIG. 18 shows success in identifying constructs that can domain swap and complement split HaloTag fragments under these conditions, facilitated by their fusion to FRB or FKBP and inclusion of Rapamycin. This experiment shows that cpHaloTag variants missing fragments of their lid domain cpHT(Δ146-157) can form a complementation system through domain swapping with other cpHaloTag variants that have termini in the lid domain and can donate the necessary residues.

[0366] LgBiT and SmBiT tags on fragments of split HaloTag fused to FRB/FKBP were used to measure complementation and reversibility of each complex in a fluorescence-independent manner. NanoBiT detection of fragment complementation closely matched the pattern of activities associated with JF646 HaloTag ligand labeling. In the absence of Rapamycin, low luminescence and JF646 labeling was detected, but upon addition of Rapamycin both signals increased significantly, indicating that complex formation and restoration of enzymatic activity were dependent on facilitation though the FRB:FKBP interaction. The addition of FK506, an inhibitor of the FRB:FKBP interaction, to reactions showed a decrease both luminescence and fluorescence signals for all constructs after their Rapamycin-dependent complementation, demonstrating that these split HaloTag fragments are physically and functionally reversible.

[0367] Robustness of the internal split HaloTag complementation systems to human body fluid matrices was tested in order to assess their utility for diagnostic or clinical applications. Both the spHT145 and spHT195 showed resistance to each matrix up to the 10% limit that was tested, retaining their Rapamycin-dependent complementation and activity. This experiment demonstrates that these split HaloTag fragments were tolerant of human fluid body matrices and could be envisioned as a technology for detecting molecular proximity or binding in diagnostic or clinical assays.

### Example 4

### N-Terminal Split Sites

[0368] Experiments were conducted during development of embodiments herein to test combinations of N-terminal split HaloTag fragments to determine if they can be induced to complement as FRB or FKBP fusions. The role of sequence overlap in determining performance was examined. A range of small peptide-sized, N-terminal fragments could be observed to show a Rapamycin-dependent response in activity with JF646 HaloTag ligand. Since the larger fragment was comprised of residues 22-297 or 23-297, many of the small fragments tested have either gaps or overlaps in their sequences. This demonstrated complementation with these N-terminal split fragments across a range of sequence variability and lengths.

[0369] N-terminal split HaloTag system was optimizable through systematic evaluation of truncations of the smaller HT(1-19) fragment. FIG. 22 shows that truncation of the first 2-3 N-terminal residues in particular enhances the fold response of the system to Rapamycin. Complementation activity was demonstrated with fragments as small as 11 amino acids (HT(8-19)).

[0370] The ability to detect complementation of a N-terminal split HaloTag fragment independent of its activity by fusion to NanoBiT components was tested. A 100-250-fold increase in luminescence was observed upon addition of Rapamycin, which corresponded to increases in labeling with JF646 in separate assays, indicating that both fragment complementation though physical proximity and also enzymatic activity could be detected for the asymmetric N-terminal split HaloTag fragments.

[0371] Other N-terminal split HaloTag fragments were functional in dual tag configurations with HiBiT. When HiBiT was appended to multiple different, N-terminal, small HaloTag fragments, both HaloTag activity through binding of JF646 ligand and NanoBiT activity with the HiBiT tag could simultaneously be detected (in different reactions). This demonstrated that these tags could be used in tandem for making multiple measurements from a single system such that users could append this dual tag for multiple uses in both luminescence and fluorescence.

[0372] Given the differences between the HT(22-297) and HT(23-297) large fragments, the role of the Met22 position was examined through site saturation and mutation to all other amino acids. Amino acids at position 22 that improve brightness (M22I or M22L, for example) were identified, and those that improve the fold response of the system (M22F). It was also observed that introduction of mutations of “HaloTag9” (Q165H+P174R) significantly enhanced the labeling speed of the system when added to the HT(22-297) large fragment. These experiments demonstrated that mutations can be introduced to both the large and small fragments of these split HaloTag variants to improve system performance.

[0373] Given that the mutations in each small and large fragment of the N-terminal HaloTag splits resulted in improvements in brightness and fold response with the JF646 ligand, they were tested with other Janelia Fluor HaloTag ligands (FIG. 26). This experiment demonstrated that mutations in each of the N-terminal split fragments can modulate kinetics of labeling with different HaloTag ligands. In addition, it showed that given enough time, out to 66 hours, some of the configurations continue to increase in brightness and fold response, resulting in responses for some as much as 60-fold. It also showed that several configurations achieved equivalent brightness to full-length HaloTag7 with their relative brightness at 1.0 or above the HaloTag7 control.

[0374] The experiments in FIG. 27 detection of a Rapamycin-dependent response in split HaloTag activity in live mammalian cells. The response could be detected for multiple small HaloTag fragments (HT(3-19), HT(4-19)) with different large HaloTag fragments. System performance was optimized by introduction of mutations into the HT(22-297) large fragment, either the Q165H+P174R double mutant or M22F mutations as shown. The fold responses (labeling speed after pre-incubation with Rapamycin) were detectable within 15 minutes, indicating that these split HaloTag configurations are suitable for live cell-based assays that detect many biological processes in real time.

[0375] Experiments also demonstrated the functionality and utility of split HaloTag systems in live cell fluorescence microscopy. This is a desirable modality for detection, particularly given the development and use of the Janelia Fluor HaloTag ligands for advanced cell imaging applications such as STED or STORM. Experiments demonstrated that split HaloTag configurations have comparable brightness to full-length HaloTag7 (FIG. 28), and that the fluorescence signal of the live cells was dependent on the addition of Rapamycin to facilitate the interaction of the split HaloTag fragments (FIG. 28), highlighting its utility as a reporter for molecular interactions inside live cells.

### Example 5

### Use of Synthetic Peptides to Measure Split HaloTag Complementation

[0376] Experiments conducted during development of embodiments herein demonstrated that a synthetic peptide version of the HaloTag[3-19] fragment can be used, and complementation observed with the HaloTag[22-297](M2F) fragment (FIG. 30). At the highest concentration of peptide tested, 1 mM, saturation of the fluorescence signal was not observed, indicating that the affinity between the split HaloTag fragments is likely >100 micromolar, which is expected to be a suitable range for protein:protein interaction studies in vivo since their low affinity requires fusion to interacting partners to form a complemented complex.

[0377] Experiments additionally demonstrated that a synthetic peptide version of the HaloTag[3-19] fragment can be used, and complementation observed, but with a different variant of the LgHT, HaloTag[22-297](Q145H+P154R). This LgHT variant is more stable and expresses better, leading to higher complemented signal, although lower fold response due to its higher “background” or uncomplemented signal (FIG. 31). This LgHT mutant does appear to approach saturation of the fluorescence signal, indicating that the affinity between the split HaloTag fragments is approximately 1 micromolar, which might be considered higher affinity than would be ideal for protein:protein interactions studies in vivo, although complementation in mammalian cells using this LgHT variant has been observed, indicating it can be used for the purpose.

[0378] A different HaloTag ligand (TMR) and fluorescence polarization assay format can be used to measure complementation with synthetic peptides (FIG. 32). The relative kinetic rate of labeling for HaloTag[22-297](M2F) at different levels of complementation with peptide is demonstrated. At high peptide concentrations, the complementation with the peptide results in greater labeling rates.

[0379] The LgHT variant, HaloTag[22-297](Q145H+P154R), was also tested with the HaloTag ligand (TMR) in the fluorescence polarization assay format to measure complementation with synthetic peptides (FIG. 33). The relative kinetic rate of labeling is higher for this mutant without peptide due to its greater intrinsic stability and expression in E. coli lysates. In the presence of peptide, it is able to achieve faster labeling rates relative to the HaloTag[22-297](M2F) mutant.

[0380] The use of a fully purified split HaloTag system—6×His-HaloTag[22-297](M2F) and synthetic HaloTag[3-19] peptide—are able to complement each other in vitro, resulting in an increase in fluorescence intensity following complementation and labeling with JF646 ligand (FIG. 34). The fold response to varying concentrations of synthetic HaloTag[3-19] peptide for the purified 6×His-HaloTag[22-297](M2F) relative to the uncomplemented reaction lacking peptide was calculated (FIG. 35).

[0381] A fully purified split HaloTag system, with the synthetic peptide modified by the addition of two consecutive arginine residues to the N-terminus of the HaloTag[3-19] sequence, was used in an attempt to improve the solubility of the peptide. Although an increase in peptide solubility was not observed, it demonstrated that the N-terminus of the peptide can be modified with additional residues while retaining function of the split HaloTag system (FIG. 36).

[0382] Experiments were conducted during development of embodiments herein to determine the fold response to varying concentrations of the variant synthetic HaloTag[3-19] peptide for the purified 6×His-HaloTag[22-297](M2F) relative to the uncomplemented reaction lacking peptide (FIG. 37).

[0383] A fully purified split HaloTag system, but with a variant of the LgHT, 6×His-HaloTag[22-297](Q145H+P154R) and synthetic HaloTag[3-19] peptide, was able to complement with each other in vitro, resulting in an increase in fluorescence intensity following complementation and labeling with JF646 ligand (FIG. 38). This variant of LgHT does saturate its fluorescence intensity at higher peptide concentrations, indicative of a higher apparent affinity for the peptide.

[0384] Experiments were conducted during development of embodiments herein to demonstrate the fold response to varying concentrations of synthetic HaloTag[3-19] peptide for the purified 6×His-HaloTag[22-297](Q145H+P154R) relative to the uncomplemented reaction lacking peptide FIG. 39). Due to its higher affinity, this variant LgHT is able to show measurable fold responses to lower concentrations of the peptide, down to the mid-nanomolar range, suggesting it could be suitable as a stand-alone SmHT detection system, assuming the assay conditions are sufficient for complementation.

[0385] Experiments were conducted to demonstrate the use of a purified split HaloTag system with a modified synthetic peptide that adds two consecutive arginine residues to the N-terminus of the HaloTag[3-19] sequence (FIG. 40). The N-terminus of the peptide can be modified with additional residues and retain function of the split HaloTag system, in this case, using the HaloTag[22-297](Q145H+P154R) variant.

[0386] The fold response to varying concentrations of the variant synthetic HaloTag[3-19] peptide for the purified 6×His-HaloTag[22-297](Q145H+P154R) relative to the uncomplemented reaction lacking peptide (FIG. 41). Relative to the HaloTag[22-297](M2F) comparator, this LgHT variant shows a higher fold response at lower peptide concentrations, potentially useful for detection of the variant SmHT peptide as a detection reagent.

[0387] This purified system shows the successful detection of shorter peptides based on residues HaloTag[8-19], with N- or C-terminal arginine addition (FIG. 42). The shorter peptides show a lower affinity than the HaloTag[3-19] peptide. This demonstrates that a shorter peptide can be used for complementation in the split HaloTag system, and that sequence additions to the shorter sequence can be tolerated, potentially to optimize the system further. This purified system also shows the successful detection of shorter peptides based on residues HaloTag[8-19], with N- or C-terminal arginine addition, in this case using the variant LgHT, HaloTag[22-297](Q145H+P154R) (FIG. 43). The shorter peptides show a lower affinity than the HaloTag[3-19] peptide, however, since this LgHT variant has higher affinity for the full length and shorter peptides

### Example 6

### Mutagenesis of the HaloTag[3-19] or “Small HaloTag” Sequence

[0388] Experiments were conducted during development of embodiments herein to test all possible single mutations in the HaloTag[3-19] fragment. Expression and activity data of the HaloTag[3-19] variants is provided in Table 1. FIG. 44-60 represent the 19 amino acid changes at an individual position (numbered 1-17). The HaloTag[3-19] mutants were expressed as fusions to the C-terminus of FKBP and tested for facilitated complementation with the HaloTag[22-297](M2F)-FRB fusion via the addition of Rapamycin in E. coli lysates. These experiments helped identify positions in the HaloTag[3-19] fragment that are tolerant to mutations and enabled building of multiple mutations into the fragment. The effects of combining well tolerated mutations at each position together are shown, starting with double/triple/quadruple/etc. mutations, and eventually reaching designs where all 17 positions can be mutated simultaneously in functional variants that have 0% identity with the starting HaloTag[3-19] sequence. Most interactions with the large fragment occur through the main-chain, beta-strand interactions and do not rely on sidechains. For the few sidechains that do participate in the interaction, conservative mutations to change the residue but preserve the characteristics of the sidechain interaction can be made, such as a phenylalanine to tyrosine mutation, preserving the sidechain hydrophobicity. Therefore, a functional small HaloTag fragment with all 17 positions mutated can be achieved.

[0389] Mutation of residue E1 of the HaloTag[3-19] sequence showed no detrimental mutations and several potential beneficial ones (E1A, E1H, E1K) (FIG. 44).

[0390] Mutation of residue I2 of the HaloTag[3-19] sequence showed beneficial mutations with larger hydrophobic sidechain such as I2F, I2W, and I2Y (FIG. 45). The I2T mutation was the only one that showed a significant loss of performance in the assay.

[0391] Mutation of residue G3 of the HaloTag[3-19] sequence showed improvement with the G3N mutation and several detrimental mutations: G3I, G3T, and G3W that had significant loss of performance (FIG. 46).

[0392] Mutation of residue T4 of the HaloTag[3-19] sequence showed some improvement with T4S and T4E mutations and some detrimental effects from the T4L and T4W mutations (FIG. 47).

[0393] Mutation of residue G5 of the HaloTag[3-19] sequence showed generally good tolerance across all amino acid changes (FIG. 48).

[0394] Mutation of residue F6 of the HaloTag[3-19] sequence showed this residue to be highly sensitive to mutation (FIG. 49). Most mutations were detrimental, with the exception of F6M, F6W, and F6Y that showed performance similar to the unmutated protein. This is an example that shows preserving the hydrophobic nature (see also Ile and Val mutations) and especially ring structure (see also Histidine mutation) of the sidechain to be beneficial for interaction with the large fragment.

[0395] Mutation of residue P7 of the HaloTag[3-19] sequence showed improvements with P7N and less so P7H or P7A (FIG. 50). The mutation to P7K appeared to be significantly detrimental to activity. As shown in later figures, mutations such as P7N are well tolerated as a single mutation but generally result in lower activity when combined with other mutations in HaloTag[3-19].

[0396] Mutation of residue F8 of the HaloTag[3-19] sequence showed, similar to F6, that this is a highly sensitive residue to mutation (FIG. 51). Only mutations F8W and F8Y were well tolerated, indicating that preserving the large hydrophobic sidechain at this position is needed for complementation. Some slight complementation activity was detectable with F8D and F8R, but these were lower than the unmutated HaloTag[3-19].

[0397] Mutation of residue D9 of the HaloTag[3-19] sequence showed that all mutations were well tolerated with some beneficial mutations coming from D9A, D9P, D9Q, and D9R (FIG. 52).

[0398] Mutation of residue P10 of the HaloTag[3-19] sequence showed moderate sensitivity to many mutations (FIG. 53). Mutations P10A, P10E, P10S, and P10H were among the most well tolerated. Mutations P10I and P10K were the most detrimental, although still functional. It should be noted that, similar to residue P7, mutations that are well tolerated at P10 as single mutations are mostly detrimental when combined with other mutations in HaloTag[3-19]. So, while mutations at P7 and P10 can be tolerated, they seem to be in their own category of positions that do not combine well with other mutations.

[0399] Mutation of residue H11 of the HaloTag[3-19] sequence showed improvement through H11N but H11D, H11G, and H11P were shown to be highly detrimental mutations (FIG. 54). Similar to F6, F8, and Y12, this is part of a set of residues that makes contact with the large fragment through their hydrophobic ring sidechains, although H11 seems to tolerate more mutations than the other three residues in the set.

[0400] Mutation of residue Y12 of the HaloTag[3-19] sequence showed that it is highly sensitive to mutation, with tolerance for conservative mutations Y12F and Y12W that preserve its hydrophobic ring sidechain (FIG. 55). Some charged residues were tolerated as well but with lower activity, such as Y12H and Y12R. All other mutations seem to be very detrimental at this position. Along with F6, F8, and Y12, this is a large hydrophobic sidechain that only tolerates a few amino acid changes that preserve its characteristics.

[0401] Mutation of residue V13 of the HaloTag[3-19] sequence showed a tolerance for other similar hydrophobic amino acids such as V13A, V13L, and V13I (FIG. 56). There were lower but active mutations with charged residues as well, with some notable non-functional mutations as shown.

[0402] Mutation of residue E14 of the HaloTag[3-19] sequence showed tolerance across all mutations, with the possible exception of E14L that was lower than the unmutated sequence (FIG. 57).

[0403] Mutation of residue V15 of the HaloTag[3-19] sequence showed tolerance to other hydrophobic amino acids, notably V15I and V15L that are conservative mutations (FIG. 58). It did not seem to tolerate charged residues well although many still had detectable activity.

[0404] Mutation of residue L16 of the HaloTag[3-19] sequence showed tolerance to changes to all amino acids (FIG. 59).

[0405] Mutation of residue G17 of the HaloTag[3-19] sequence showed tolerance to all amino acids, with a small preference for the G17A or G17Q mutations that have higher −RAP and +RAP intensities (FIG. 60).

[0406] Aggregating all single amino acid changes into a single graph demonstrates that, in the absence of Rapamycin, there is some variation in the non-facilitated complementation of the HaloTag[3-19] mutants, with potentially a few mutants, e.g., F8D and E14P, that separate themselves with higher spontaneous interaction with the larger fragment (FIG. 61). Aggregation of the data on all single mutants in the presence of Rapamycin shows that some positions are highly tolerant of mutations, such as E1, G5, D9, E14, L16, and G17, for example (FIG. 62). There is a set of mutations that has low tolerance to mutations, with only a few conservative mutations that preserve the characteristics of the sidechains, such as F6, F8, H11, Y12, V13, and V15.

[0407] Based on single mutant data that showed positions F6, F8, H11, Y12, V13, and V15 were limiting in their tolerance to mutations, panels of double mutations were designed to determine how much diversity could be introduced starting from these stringent positions. Many combinations of mutations were tested at these positions (FIG. 63). Combinations with F6Y and F6W tended to be the best overall, with F6M combinations being tolerated, but showing lower activity. F8W also tended to be preferred across combinations than F8Y. This experiment showed that although these positions tolerate less diversity, they can still be mutated in combination to obtain a functional split HaloTag system. Preferred combinations included those with Y12W and F8Y. Mutations with V8W or V15L tended to be lower in activity (FIG. 64).

[0408] Double mutants were generated to target the highly tolerant positions in the HaloTag[3-19] fragment to determine if charged residues can be introduced in combination (FIG. 65). Multiple charge mutations can be introduced simultaneously, changing the characteristics of the sequence to highly negative or highly positively charged.

[0409] Triple mutant combinations showed that mutation combinations that incorporate changes at P7 or P10 tended to be much lower activity, although there are some preferred combinations that showed high activity, such as I2F+G3N+P7N and I2D+G5R+P10A (FIG. 66). These combinations introduced charged residues and mutated hydrophobic positions simultaneously, and many of them were well tolerated.

[0410] Combinations were generated to test the introduction of charged residues and mutating hydrophobic residues simultaneously (FIG. 67). Similar to other experiments, mutations to P7 or P10 tended to be less tolerated across all combinations. Many examples of introducing both charge and change of hydrophobic residues in the same sequence are shown, such as G3D+G5R+P10E that shows similar activity to the unmutated HaloTag[3-19].

[0411] Combinations generated to test combinations where both the stringent P7 and P10 residues are mutated together show good activity, such as G5R+P7Q+P10A (FIG. 68).

[0412] Triple mutations generated including combinations at three of the stringent hydrophobic residues F6, F8, and Y12 show that if tolerated mutations are selected at each position all of them can be changed in a single combination, such as F6W+F8Y+Y12F (FIG. 69). More charges can also be introduced, such as several arginine residues, e.g., D9R+E14R+G17R.

[0413] Expanding on the double and triple mutant combinations that were well tolerated, mutations continued to be combined, showing that many positions can be mutated simultaneously in the HaloTag[3-19] sequence, including those that change all the stringent hydrophobic residues and proline residues together, such as F6W+F8Y+Y12F+V13L+V15I+G3N+G5Q+P7N, a sequence with 8 of the 17 positions mutated (FIG. 70).

[0414] A multiple mutation set was generated focusing on introducing many charged residues into the sequence and mutating the stringent proline residues together (FIG. 71). Many combinations of the P7 and P10 mutated together tended to be detrimental, although most are still functional. Mutagenesis was further expanded to show that by using many of the well tolerated mutations at more positions, HaloTag[3-19] sequences with up to 12 positions mutated can be generated (FIG. 72). Additional combinations identified a top mutant with 14 positions mutated that shows activity similar to the unmutated HaloTag[3-19] control (FIG. 73). Mutants were tested in which all 17 positions in the HaloTag[3-19] were mutated simultaneously (FIG. 74). This demonstrated several sequences still showing complementation activity. Notably, E1K+I2F+G3N+T4D+G5Q+F6W+P7N+F8Y+D9R+P10A+H11N+Y12F+V13L+E14K+V15I+L16R+G17R showed similar activity to the unmutated HaloTag[3-19] with all 17 positions mutated in the sequence (0% identity to HaloTag[3-19]). This example shows that side chain characteristics (hydrophobicity, charge, etc.) rather than identity are sufficient for providing the interactions with the large fragment in complementation assays.

### Example 7

### Mutagenesis of the HaloTag[22-297](M2F) or “Large HaloTag” Fragment

[0415] Experiments were conducted during development of embodiments herein to explore the impact of single and multiple substitutions on the expression and/or activity of the HaloTag[22-297](M2F) fragment. The expression and activity data of the HaloTag[22-297](M2F) variants is provided in Table 2.

[0416] Single mutations were identified that improve the expression and/or activity of the HaloTag[22-297](M2F) fragment (FIGS. 75-77). Single mutations were identified that improve the fold response of the HaloTag[22-297](M2F) fragment (FIG. 78-80). Double mutations were then identified that improve the expression and/or activity (FIG. 81) or fold response (FIG. 82) of the HaloTag[22-297](M2F) fragment. Triple mutations were identified that improve the expression and/or activity of the HaloTag[22-297](M2F) fragment (FIG. 83).

[0417] Experiments were conducted during development of embodiments herein to demonstrate that when excess peptide is present to facilitate maximum interaction with the best HaloTag[22-297](M2F) mutants, many have further improved activity relative to the unmutated control (FIGS. 84-85). There are several mutants with greater than 3-fold improved expression and/or fold response.

[0418] Thermal challenge conducted with complemented HaloTag[22-297](M2F) mutants shows many mutations that improve the expression and stability of the protein while retaining responsiveness to peptide (FIGS. 86-87). Thermal challenge of complemented HaloTag[22-297](M2F) mutants shows many mutations that improve the fold response of the protein where the complemented complex has higher thermal stability relative to the unmutated control (FIGS. 88-89).

### Example 8

### Split HaloTag Use in Mammalian Cells

[0419] A plate-based fluorescent assay was conducted demonstrating that split HaloTag fragments can complement each other in the FRB/FKBP model system (FIG. 90). The best SmHT in this assay was HaloTag[1-30], but it also exhibited higher background (no Rapamycin) complementation. Fold response from the assay is depicted in FIG. 91).

[0420] Gel-based assays were conducted to confirm that the LgHT fragment is the species being labeled with HaloTag ligand by showing the correct size band on a fluorescence gel (FIG. 92).

[0421] SmHT optimization was performed by truncation, demonstrating that HaloTag[3-19] and [4-19] showed good fluorescence intensities and high fold responses (FIG. 93). Both SmHT sequences work with the two LgHT sequences tested in the experiment. Fold response from the assay is depicted in FIG. 94).

[0422] Experiments were conducted during development of embodiments herein to demonstrate that split HaloTag fragments can be used for detection of protein interactions by fluorescence microscopy (FIGS. 95-100). In the absence of Rapamycin, the split HaloTag fragments show very little labeling with JF646 ligand using microscopy (FIG. 101). Quantitation shows the difference in labeling in the two fluorescence channels. GFP signal is high because it tracks expression of the SmHT construct, but the Far-red is low since there is no Rapamycin to facilitate complementation and reconstitution of split HaloTag activity.

[0423] Comparison of LgHT and SmHT variants in mammalian cell assays show that many configurations comprising different sequences of both can be used to detect protein interactions (FIGS. 103-104).

[0424] Experiments were conducted during development of embodiments herein using a more optimized system comprising the HaloTag[3-19] fusion and a variant LgHT fusion (FIGS. 105-106). This shows high specificity of the fluorescence labeling of the split HaloTag only in the presence of Rapamycin to facilitate the interaction of their fusion partners. A 25-fold response to Rapamycin was observed.

[0425] Experiments were conducted during development of embodiments herein using the HaloTag[3-19] fusion and the M2F variant of LgHT as a fusion (FIG. 107-108). High specificity of the fluorescence labeling of the split HaloTag was only observed in the presence of Rapamycin to facilitate the interaction of their fusion partners.

[0426] Experiments were conducted during development of embodiments herein to demonstrate quantitation of cell imaging data from several fields of view for different SmHT and LgHT variant combinations (FIG. 109). The median cell intensity increases in the presence of Rapamycin across all the configurations shown, with perhaps the best combination being the HaloTag[22-297](M2F)+HaloTag[3-19] variants.

[0427] Experiments were conducted during development of embodiments herein extending the demonstrated use in cell imaging with more HaloTag ligands (FIG. 110). JF585 HaloTag ligand was used. EGFP shows the expression and localization of the SmHT fusion independent of labeling activity.

[0428] Live cell imaging was conducted of split HaloTag activity in mammalian cells using JF585 HaloTag ligand in the absence of facilitated interaction between split HaloTag fragments. Experiments demonstrated the background level of labeling using JF585 HaloTag ligand, where there is no facilitation in the interaction with Rapamycin (FIG. 111). In another demonstrated use in cell imaging with more HaloTag ligands, using JF635 HaloTag ligand, EGFP shows the expression and localization of the SmHT fusion independent of labeling activity (FIG. 112).

[0429] Live cell imaging was conducted of split HaloTag activity in mammalian cells using JF635 HaloTag ligand in the absence of facilitated interaction between split HaloTag fragments. Experiments demonstrated the background level of labeling using JF585 HaloTag ligand, where there is no facilitation in the interaction with Rapamycin (FIG. 113).

[0430] Experiments were conducted during development of embodiments herein to compare the fluorescent intensity of all imaged cells in serval fields of view in +/−RAP conditions with fluorogenic ligand JF585 and JF635 (FIG. 114). Quantitation of individually imaged cells demonstrates the use of JF585 and JF635 HaloTag ligands provided a Rapamycin-dependent increase in the median intensity of fluorescence of the imaged cells. The controls in the experiment combining the more optimal HaloTag[3-19] fragment variant with the HaloTag[22-297](Q145H+P154R), showing that in the absence of Rapamycin, there is very low labeling of the split HaloTag. In other words, this shows the low background of the system (FIG. 116). Another control in the experiment combining the more optimal HaloTag[3-19] fragment variant with the HaloTag[22-297](Q145H+P154R) shows that in the absence of the HaloTag[3-19] fragment, there is very low labeling of the large HaloTag fragment. A quantitative difference in fluorescence intensity of cells is observed when compared to controls lacking Rapamycin or the HaloTag[3-19] fragment.

[0431] Experiments were conducted during development of embodiments herein using the combination of the more optimal HaloTag[3-19] fragment variant with the HaloTag[22-297](M2F) variant and measuring complementation in the model FRB/FKBP system with live cell fluorescent imaging (FIG. 119). In the absence of Rapamycin, there is very low labeling of the split HaloTag. In other words, this shows the low background of the system (FIG. 120).

[0432] Experiments were conducted during development of embodiments herein combining a more optimal HaloTag[3-19] fragment variant with the HaloTag[22-297](M2F), showing that in the absence of the HaloTag[3-19] fragment, there is very low labeling of the large HaloTag fragment (FIG. 121). The low background of the system is demonstrated. In agreement with the live mammalian cells plate assay experiments, the S:B ratio in +rapamycin/−rapamycin conditions is higher with HaloTag[22-297](M2F), about 6.7, compared to HaloTag[22-297](Q145H+P154R), about 4. For both of the large HaloTag fragments, the background signal from the self-complementation without Rapamycin is higher than the background from labeling the Large HaloTag in the absence of the HaloTag[3-19] fragment. The signal-to-background ratio in the presence of Rapamycin for complemented split HaloTag over labeling the large HaloTag alone is 16 and 5.7 for HaloTag[22-297](M2F) and HaloTag[22-297](Q145H+P154R), respectively.

[0433] Kinetic Studies were conducted using complementation and labeling kinetics of the split HaloTag (FIGS. 122-123). To measure the complementation and labeling rate of the split HaloTag in the FRB/FKBP model system, a time-lapse imaging experiment was used. Transfected cells were immediately imaged every 15 minutes for 12 hours after the addition of both Rapamycin and JF646 HaloTag ligand. These experiments showed that even 1 hour incubation with Rapamycin is sufficient time to image cells with high expression of the constructs.

[0434] Experiments were conducted during development of embodiments herein to compare the expression of HaloTag[22-297](Q145H+P154R) vs. HaloTag[22-297](M2F) as complemented with the small HaloTag fragment HaloTag[3-19] and non-complemented form in mammalian cells (FIG. 124). The lytic TMR assay demonstrated that HaloTag[22-297](Q145H+P154R) expressed better than HaloTag[22-297](M2F) in mammalian cells as both complemented with the small HaloTag fragment and non-complemented forms.

### Example 9

### Detection of Protein:Protein Interactions (BRD4:Histone H3 Interaction)

[0435] The BRD4:Histone H3.3 is a constitutive protein:protein interaction (PPI) in mammalian cells (no inducer is necessary). Fusion of the split HaloTag fragments as indicated allowed for detection of the interaction by labeling with JF646 in plate-based assays (FIG. 125).

[0436] Reversibility of a PPI with split HaloTag can be measured by inhibiting previously assembled protein complexes in cells using drug compounds (FIG. 126). Fold response of BRD4:Histone H3 interaction to JQ1 inhibitor shows that, in several configurations of the split HaloTag fragments, the inhibition of the interaction between BRD4 and Histone H3 can be detected (FIG. 127).

[0437] In addition to plate-based assays, split HaloTag can be used to detect protein:protein interaction in live cells using fluorescence microscopy (FIG. 128).

[0438] Inhibition of the BRD4:Histone H3 interaction can be detected with fluorescence microscopy as well since treatment of cells with the JQ1 interaction inhibitor significantly reduces the labeling with JF646 HaloTag ligand as the split HaloTag fragments no longer complement efficiently (FIG. 129).

[0439] In the absence of the HaloTag[3-19] fragment, very little labeling with JF646 HaloTag ligand was observed, demonstrating the specificity of the labeling for the presence of the complementing split HaloTag fragments (FIG. 130).

[0440] Quantitation of cells imaged across experiments shows the measurable decrease in median intensity of JF646 HaloTag ligand labeling when treated with an inhibitor of the interaction (FIG. 131).

[0441] A second set of imaging experiments was performed to confirm reproducibility and show improvement of the system's signal-to-background ratio by changing a few confocal microscope settings, such as lower gain and laser intensity (FIG. 132). Lower treatment with JQ1 inhibitor still showed nearly complete lack of labeling with JF646 HaloTag ligand, indicating measurement of the lack of interaction between the protein fusion targets (FIG. 133).

[0442] In the first imaging experiment (FIG. 127-130), images were collected with 85 far-red laser intensity resulting in S:B ratio of about 4. The purpose of the second experiment (FIG. 131-134) with lower signal intensity was to see if most of the background signal could be eliminated with the cost of the overall reduction in the specific signal in the far-red channel. Quantifying the imaging data showed that lower laser intensity reduced the background more than the specific signal, leading to enhanced S:B ratios 6 and 12 for background in the presence of JQ1 and background from labeling the large HaloTag, respectively (FIG. 135).

[0443] Experiments were conducted during development of embodiments herein to measure the JF646 HaloTag ligand labeling kinetics of the pre-existing complemented complex in live cells (FIG. 136). Since the reaction of BRD4 and histone H3.3 does not require an inducer, the binding complex starts to form as the two fusions are expressed in cells. Therefore, this system is a good candidate to measure the rate of complemented split HaloTag constructs labeling with JF646 ligand. Notably, labeling consists of making the covalent bond with the chloroalkane moiety and activating the fluorescence, which cannot be measured separately by imaging.

[0444] To measure the labeling rate, cells were immediately imaged after ligand addition every 10 minutes for 70 minutes (FIG. 137). A Z-stack image was obtained at all time points to ensure all cells were captured in focus. The most focused Z levels were merged into one, and the intensity of all cells (6 total objects) was measured and averaged at all time points. Thus, every dot on the plot for both the far-red and green channels is the average of the cell intensities in the imaged field of view. Quantifying the data shows that the signal in the far-red channel reaches its maximum in about 40 minutes, and as expected, the intensity in the green channel remains unchanged during the measurement.

[0445] Experiments were conducted during development of embodiments herein to determine the effect of SmHaloTag peptide dissociation on the fluorescence intensity (FIG. 138). Measurement of the fluorescence intensity of Split HaloTag after the dissociation of the Small HaloTag peptide, HaloTag[3-19], was tested. After the separation of the SmHaloTag, the Large HaloTag, HaloTag[22-297](M2F), is still covalently bound to the ligand but does the Small HaloTag dissociation affect the ligand fluorogenicity/activity? Time-lapse live cell imaging was performed to address this question. To ensure the tracked cell was viable during the experiment, the area occupied by that specific cell was measured at all time points. The results of the cell area show that that cell was stable and lived up to about 5 hours, but then after that it started to shrink. During this period, the cell intensity reduces almost by half indicating that although the Large HaloTag, HaloTag[22-297](M2F), is bound with ligand but JF646 is losing its fluorogenicity/activity slowly upon SmHaloTag dissociation.

### Example 10

### Detection of Protein:Protein Interactions (Calmodulin:M13 Interaction)

[0446] Similar to studying other protein-protein interactions, the fluorescent activity of all different fusion orientations was measured (FIG. 140) and fold response was calculated (FIG. 141). The C-terminal fusion of the small HaloTag fragment in complementation with M13-HaloTag[22-297](M2F)-EGFP resulted in the highest activity. A modest, calcium-dependent increase in fluorescence of the split HaloTag when fused to Calmodulin and M13 peptide was observed, where the presence of calcium facilitates the interaction between the proteins.

[0447] The use of split HaloTag for measuring the interaction between Calmodulin and the M13 peptide in live mammalian cells using fluorescence microscopy was demonstrated (FIG. 142). The addition of calcium chloride to induce the interaction caused a significant increase in fluorescence from the split HaloTag complementation. There is negligible background of the HaloTag[22-297](M13) fragment alone without the presence of the HaloTag[3-19] fragment in live cells (FIG. 143), indicating the signal is specific to the complementation of the fragments facilitated by the Calmodulin:M13 interaction.

[0448] Quantitation of the split HaloTag imaging data for this model system indicates that a 7× increase in median fluorescence was observed across all cell images in the presence of calcium that facilitates the interaction (FIG. 144). The expression of the LgHT alone has low background activity and does not contribute significantly to the specific signal observed.

### Example 11

### Split HaloTag to Detect PROTAC Ternary Complex Formation

[0449] Experiments were designed to determine if the split HaloTag can be applied as a detector for tracking targeted protein degradation (FIG. 145). As a first step, the formation of a ternary complex (PROTAC ligand+E3 ligase+Target protein) by fusing split HaloTag fragments to the E3 ligase and Target protein to observe JF646 HaloTag ligand labeling dependence on PROTAC addition to cells to facilitate the interaction was measured. Additionally, imaging was done to determine the possibility of imaging of the PROTAC ternary complex using split HaloTag, which would have valuable information about its kinetics and localization as it forms in live mammalian cells. Similar to studying other protein-protein interactions, the fluorescent activity of all different fusion orientations was measured. Testing the activity of all different fusions to split HaloTag fragments helped to see a trend of better activity if the protein of interest (POI) is fused to the C-terminus of the small HaloTag fragment. Large HaloTag fragments, on the other hand, showed less sensitivity.

[0450] Imaging of the ternary complex formation in live mammalian cells provides information on subcellular localization of the complex using fluorescence microscopy (FIG. 146), depends on the addition of the PROTAC ligand, since little or no signal is observed in its absence (FIG. 147), and depends on the presence of the HaloTag[3-19] fragment, since the LgHT fragment alone has a very low signal (FIG. 148).

[0451] A PROTAC-dependent increase in JF646 HaloTag ligand fluorescence was observed due to complementation of split HaloTag when fused to the E3 ligase and target protein in the assay, demonstrating that detection of the ternary complex formation (FIG. 149). The signal-to-background ratio in +/−PROTAC ligand is higher with VHL compared to CRBN E3 ligase, 6 and 3, respectively.

### Example 12

### Split HaloTag to Detect Protein:Protein Interactions and PROTAC Ternary Complex Formation after CRISPR Introduction of the SmHT-HiBiT Tag onto the Chromosome (Targeting an Endogenous Protein, BRD4)

[0452] Experiments were conducted during development of embodiments herein to demonstrate the detection of a protein:protein interaction where the HaloTag[3-19] fragment has been introduced into the genome using CRISPR genome editing (FIG. 150). Here, it was fused as a dual tag (SmHT-HiBiT) to BRD4, and then LgHT-Histone H3 fusion on a plasmid introduced to demonstrate detection of the interaction with fluorescence imaging after JF646 HaloTag ligand addition. As a control, in the absence of the CRISPR edit to introduce the dual tag, little or no fluorescence labeling of the LgHT expressed alone was observed (FIG. 151).

[0453] The same dual tag on BRD4 at endogenous levels can be used to detect other interactions, such as the interaction with VHL E3 ligase after ternary complex formation by addition of the MZ1 PROTAC ligand (FIG. 152).

### Example 13

### Improved Performance of Large HaloTag (HaloTag[22-297](M2F)) Mutants in Mammalian Cell Assays

[0454] Experiments were conducted during development of embodiments herein to demonstrate that improvement in the expression of LgHT in mammalian cells can be done by introducing mutations, measured by a HiBiT lytic assay with the tagged mutants (FIG. 153). Preferred variants from this testing were M49F, L57I, S89A, and the double/triple mutants shown.

[0455] In addition to improving expression, mutations in the LgHT can also improve performance in protein:protein interaction assays in live mammalian cells by fusing the mutant LgHT to FRB (FIGS. 154-155). In particular, the notable mutants were M49F, T135E, S89A, V177E, D53G, and L57I, in addition to the double/triple mutants shown.

[0456] Mutants were identified that improved both the fold response and maximum fluorescence of the LgHT (FIG. 156).

1-2. (canceled)

3. A composition comprising a split variant of a polypeptide comprising (i) a first fragment of the polypeptide comprising at least 70% sequence identity with a first portion of SEQ ID NO: 1, and (ii) a second fragment of the polypeptide comprising at least 70% sequence identity with a second portion of SEQ ID NO: 1.

4-8. (canceled)

9. The composition of claim 3, wherein:
the first fragment comprises at least 70% sequence identity with a first reference sequence selected from one of SEQ ID NOS: 2, 4, 6, 8, 10, 12, 14, 16, 18, 20, 22, 24, 26, 28, 30, 32, 34, 36, 38, 40, 42, 44, 46, 48, 50, 52, 54, 56, 58, 60, 62, 64, 66, 68, 70, 72, 74, 76, 78, 80, 82, 84, 86, 88, 90, 92, 94, 96, 98, 100, 102, 104, 106, 108, 110, 112, 114, 116, 118, 120, 122, 124, 126, 128, 130, 132, 134, 136, 138, 140, 142, 144, 146, 148, 150, 152, 154, 156, 158, 160, 162, 164, 166, 168, 170, 172, 174, 176, 178, 180, 182, 184, 186, 188, 190, 192, 194, 196, 198, 200, 202, 204, 206, 208, 210, 212, 214, 216, 218, 220, 222, 224, 226, 228, 230, 232, 234, 236, 238, 240, 242, 244, 246, 248, 250, 252, 254, 256, 258, 260, 262, 264, 266, 268, 270, 272, 274, 276, 278, 280, 282, 284, 286, 288, 290, 292, 294, 296, 298, 300, 302, 304, 306, 308, 310, 312, 314, 316, 318, 320, 322, 324, 326, 328, 330, 332, 334, 336, 338, 340, 342, 344, 346, 348, 350, 352, 354, 356, 358, 360, 362, 364, 366, 368, 370, 372, 374, 376, 378, 380, 382, 384, 386, 388, 390, 392, 394, 396, 398, 400, 402, 404, 406, 408, 410, 412, 414, 416, 418, 420, 422, 424, 426, 428, 430, 432, 434, 436, 438, 440, 442, 444, 446, 448, 450, 452, 454, 456, 458, 460, 462, 464, 466, 468, 470, 472, 474, 476, 478, 480, 482, 484, 486, 488, 490, 492, 494, 496, 498, 500, 502, 504, 506, 508, 510, 512, 514, 516, 518, 520, 522, 524, 526, 528, 530, 532, 534, 536, 538, 540, 542, 544, 546, 548, 550, 552, 554, 556, 558, 560, 562, 564, 566, 568, 570, 572, 574, and 576; and
the second fragment comprises at least 70% sequence similarity with a second reference sequence selected from one of SEQ ID NOS: 1, 3, 5, 7, 9, 11, 13, 15, 17, 19, 21, 23, 25, 27, 29, 31, 33, 35, 37, 39, 41, 43, 45, 47, 49, 51, 53, 55, 57, 59, 61, 63, 65, 67, 69, 71, 73, 75, 77, 79, 81, 83, 85, 87, 89, 91, 93, 95, 97, 99, 101, 103, 105, 107, 109, 111, 113, 115, 117, 119, 121, 123, 125, 127, 129, 131, 133, 135, 137, 139, 141, 143, 145, 147, 149, 151, 153, 155, 157, 159, 161, 163, 165, 167, 169, 171, 173, 175, 177, 179, 181, 183, 185, 187, 189, 191, 193, 195, 197, 199, 201, 203, 205, 207, 209, 211, 213, 215, 217, 219, 221, 223, 225, 227, 229, 231, 233, 235, 237, 239, 241, 243, 245, 247, 249, 251, 253, 255, 257, 259, 261, 263, 265, 267, 269, 271, 273, 275, 277, 279, 281, 283, 285, 287, 289, 291, 293, 295, 297, 299, 301, 303, 305, 307, 309, 311, 313, 315, 317, 319, 321, 323, 325, 327, 329, 331, 333, 335, 337, 339, 341, 343, 345, 347, 349, 351, 353, 355, 357, 359, 361, 363, 365, 367, 369, 371, 373, 375, 377, 379, 381, 383, 385, 387, 389, 391, 393, 395, 397, 399, 401, 403, 405, 407, 409, 411, 413, 415, 417, 419, 421, 423, 425, 427, 429, 431, 433, 435, 437, 439, 441, 443, 445, 447, 449, 451, 453, 455, 457, 459, 461, 463, 465, 467, 469, 471, 473, 475, 477, 479, 481, 483, 485, 487, 489, 491, 493, 495, 497, 499, 501, 503, 505, 507, 509, 511, 513, 515, 517, 519, 521, 523, 525, 527, 529, 531, 533, 535, 537, 539, 541, 543, 545, 547, 549, 551, 553, 555, 557, 559, 561, 563, 565, 567, 569, 571, 573, 575, and 577.

10-11. (canceled)

12. The composition of claim 3, wherein the split variant comprises a sp site at a position corresponding to a position between positions 5 and 13, 36 and 51, 63 and 72, 84 and 92, 104 and 130, 142 and 148, 160 and 174, 186 and 189, 311 and 313, 221 and 229, or 269 and 290, of SEQ ID NO: 1.

13. The composition of claim 12, wherein the split variant comprises deletions of up to 40 amino acids at positions corresponding to one or more of the N-terminus of SEQ ID NO: 1, the C-terminus of SEQ ID NO: 1, and either side of the sp site.

14. The composition of claim 12, wherein the split variant comprises duplicated sequences of up to 40 amino acids at positions corresponding to either side of the sp site.

15. The composition of claim 3, wherein the split variant is capable of forming a covalent bond with a haloalkane substrate.

16. The composition of claim 3, wherein the first fragment is present as a fusion protein with a first peptide, polypeptide, or protein of interest.

17. The composition of claim 16, wherein the first peptide, polypeptide, or protein of interest is selected from the group consisting of an antibody, antibody fragment, protein A, an Ig binding domain of protein A, protein G, an Ig binding domain of protein G, protein A/G, an Ig binding domain of protein A/G, protein L, a Ig binding domain of protein L, protein M, an Ig binding domain of protein M, oligonucleotide probe, peptide nucleic acid, DARPin, anticalin, nanobody, aptamer, affimer, a purified protein, and analyte binding domain(s) of proteins.

18. The composition of claim 16, wherein the second fragment is present as a fusion protein with a second peptide, polypeptide, or protein of interest.

19. The composition of claim 18, wherein the second peptide, polypeptide, or protein of interest is selected from the group consisting of an antibody, antibody fragment, protein A, an Ig binding domain of protein A, protein G, an Ig binding domain of protein G, protein A/G, an Ig binding domain of protein A/G, protein L, a Ig binding domain of protein L, protein M, an Ig binding domain of protein M, oligonucleotide probe, peptide nucleic acid, DARPin, anticalin, nanobody, aptamer, affimer, a purified protein, and analyte binding domain(s) of proteins.

20. The composition of claim 18, wherein the first and second peptides, polypeptides, or proteins of interest are interaction elements capable of forming a complex with each other.

21. The composition of claim 20, wherein the first fragment and the second fragment are incapable of associating with each other under physiological conditions in the absence of the association of the first and second interaction elements.

22. The composition of claim 16, wherein the first and second peptides, polypeptides, or proteins of interest are co-localization elements configured to co-localize within a cellular compartment, a cell, a tissue, or an organism.

23. The composition of claim 16, wherein the second fragment is tethered to a molecule of interest.

24-31. (canceled)

32. A polynucleotide or polynucleotides encoding the composition of claim 1.

33. An expression vector or expression vectors comprising the polynucleotide or polynucleotides of claim 32.

34. A host cell comprising the polynucleotide of polynucleotide or polynucleotides of claim 32.

35-43. (canceled)

44. A method comprising to detect a protein-protein interaction in a sample comprising contacting:
(a) a first fusion comprising:
(i) a first complementary fragment of a split variant of a polypeptide comprising at least 70% sequence similarity with a first portion of SEQ ID NO: 1; and
(ii) a first protein of interest;
(b) a second fusion comprising:
(i) a second complementary fragment of a split variant of a polypeptide comprising at least 70% sequence similarity with a second portion of SEQ ID NO: 1; and
(ii) a second protein of interest; and
(c) a substrate comprising R-linker-A-X, wherein R is a functional group or solid support, X is a halogen, and A-X is a substrate for a dehalogenase enzyme;
wherein binding of the first protein of interest to the second protein of interest results in formation of a complex between the first complementary fragment and the secondary complementary fragment that is capable for forming a covalent bond with the substrate.

45-46. (canceled)

The application's sequence listing, which the Patent Office published only in electronic form, follows.

SEQUENCE LISTING (3035 sequences)

SEQ ID NO: 1 - protein, 297 aa, Synthetic construct
MAEIGTGFPFDPHYVEVLGERMHYVDVGPRDGTPVLFLHGNPTSSYVWRNIIPHVAPTHRCIAPDLIGMGKSDKPDLGYFFDDHVRFMDAFIEALGLEEVVLVIHDWGSALGFHWAKRNPERVKGIAFMEFIRPIPTWDEWPEFARETFQAFRTTDVGRKLIIDQNVFIEGTLPMGVVRPLTEVEMDHYREPFLNPVDREPLWRFPNELPIAGEPANIVALVEEYMDWLHQSPVPKLLFWGTPGVLIPPAEAARLAKSLPNCKAVDIGPGLNLLQEDNPDLIGSEIARWLSTLEISG

SEQ ID NO: 2 - protein, 292 aa, Synthetic construct
TGFPFDPHYVEVLGERMHYVDVGPRDGTPVLFLHGNPTSSYVWRNIIPHVAPTHRCIAPDLIGMGKSDKPDLGYFFDDHVRFMDAFIEALGLEEVVLVIHDWGSALGFHWAKRNPERVKGIAFMEFIRPIPTWDEWPEFARETFQAFRTTDVGRKLIIDQNVFIEGTLPMGVVRPLTEVEMDHYREPFLNPVDREPLWRFPNELPIAGEPANIVALVEEYMDWLHQSPVPKLLFWGTPGVLIPPAEAARLAKSLPNCKAVDIGPGLNLLQEDNPDLIGSEIARWLSTLEISG

SEQ ID NO: 3 - protein, 5 aa, Synthetic construct
MAEIG

SEQ ID NO: 4 - protein, 291 aa, Synthetic construct
GFPFDPHYVEVLGERMHYVDVGPRDGTPVLFLHGNPTSSYVWRNIIPHVAPTHRCIAPDLIGMGKSDKPDLGYFFDDHVRFMDAFIEALGLEEVVLVIHDWGSALGFHWAKRNPERVKGIAFMEFIRPIPTWDEWPEFARETFQAFRTTDVGRKLIIDQNVFIEGTLPMGVVRPLTEVEMDHYREPFLNPVDREPLWRFPNELPIAGEPANIVALVEEYMDWLHQSPVPKLLFWGTPGVLIPPAEAARLAKSLPNCKAVDIGPGLNLLQEDNPDLIGSEIARWLSTLEISG

SEQ ID NO: 5 - protein, 6 aa, Synthetic construct
MAEIGT

SEQ ID NO: 6 - protein, 290 aa, Synthetic construct
FPFDPHYVEVLGERMHYVDVGPRDGTPVLFLHGNPTSSYVWRNIIPHVAPTHRCIAPDLIGMGKSDKPDLGYFFDDHVRFMDAFIEALGLEEVVLVIHDWGSALGFHWAKRNPERVKGIAFMEFIRPIPTWDEWPEFARETFQAFRTTDVGRKLIIDQNVFIEGTLPMGVVRPLTEVEMDHYREPFLNPVDREPLWRFPNELPIAGEPANIVALVEEYMDWLHQSPVPKLLFWGTPGVLIPPAEAARLAKSLPNCKAVDIGPGLNLLQEDNPDLIGSEIARWLSTLEISG

SEQ ID NO: 7 - protein, 7 aa, Synthetic construct
MAEIGTG

SEQ ID NO: 8 - protein, 289 aa, Synthetic construct
PFDPHYVEVLGERMHYVDVGPRDGTPVLFLHGNPTSSYVWRNIIPHVAPTHRCIAPDLIGMGKSDKPDLGYFFDDHVRFMDAFIEALGLEEVVLVIHDWGSALGFHWAKRNPERVKGIAFMEFIRPIPTWDEWPEFARETFQAFRTTDVGRKLIIDQNVFIEGTLPMGVVRPLTEVEMDHYREPFLNPVDREPLWRFPNELPIAGEPANIVALVEEYMDWLHQSPVPKLLFWGTPGVLIPPAEAARLAKSLPNCKAVDIGPGLNLLQEDNPDLIGSEIARWLSTLEISG

SEQ ID NO: 9 - protein, 8 aa, Synthetic construct
MAEIGTGF

SEQ ID NO: 10 - protein, 288 aa, Synthetic construct
FDPHYVEVLGERMHYVDVGPRDGTPVLFLHGNPTSSYVWRNIIPHVAPTHRCIAPDLIGMGKSDKPDLGYFFDDHVRFMDAFIEALGLEEVVLVIHDWGSALGFHWAKRNPERVKGIAFMEFIRPIPTWDEWPEFARETFQAFRTTDVGRKLIIDQNVFIEGTLPMGVVRPLTEVEMDHYREPFLNPVDREPLWRFPNELPIAGEPANIVALVEEYMDWLHQSPVPKLLFWGTPGVLIPPAEAARLAKSLPNCKAVDIGPGLNLLQEDNPDLIGSEIARWLSTLEISG

SEQ ID NO: 11 - protein, 9 aa, Synthetic construct
MAEIGTGFP

SEQ ID NO: 12 - protein, 287 aa, Synthetic construct
DPHYVEVLGERMHYVDVGPRDGTPVLFLHGNPTSSYVWRNIIPHVAPTHRCIAPDLIGMGKSDKPDLGYFFDDHVRFMDAFIEALGLEEVVLVIHDWGSALGFHWAKRNPERVKGIAFMEFIRPIPTWDEWPEFARETFQAFRTTDVGRKLIIDQNVFIEGTLPMGVVRPLTEVEMDHYREPFLNPVDREPLWRFPNELPIAGEPANIVALVEEYMDWLHQSPVPKLLFWGTPGVLIPPAEAARLAKSLPNCKAVDIGPGLNLLQEDNPDLIGSEIARWLSTLEISG

SEQ ID NO: 13 - protein, 10 aa, Synthetic construct
MAEIGTGFPF

SEQ ID NO: 14 - protein, 286 aa, Synthetic construct
PHYVEVLGERMHYVDVGPRDGTPVLFLHGNPTSSYVWRNIIPHVAPTHRCIAPDLIGMGKSDKPDLGYFFDDHVRFMDAFIEALGLEEVVLVIHDWGSALGFHWAKRNPERVKGIAFMEFIRPIPTWDEWPEFARETFQAFRTTDVGRKLIIDQNVFIEGTLPMGVVRPLTEVEMDHYREPFLNPVDREPLWRFPNELPIAGEPANIVALVEEYMDWLHQSPVPKLLFWGTPGVLIPPAEAARLAKSLPNCKAVDIGPGLNLLQEDNPDLIGSEIARWLSTLEISG

SEQ ID NO: 15 - protein, 11 aa, Synthetic construct
MAEIGTGFPFD

SEQ ID NO: 16 - protein, 285 aa, Synthetic construct
HYVEVLGERMHYVDVGPRDGTPVLFLHGNPTSSYVWRNIIPHVAPTHRCIAPDLIGMGKSDKPDLGYFFDDHVRFMDAFIEALGLEEVVLVIHDWGSALGFHWAKRNPERVKGIAFMEFIRPIPTWDEWPEFARETFQAFRTTDVGRKLIIDQNVFIEGTLPMGVVRPLTEVEMDHYREPFLNPVDREPLWRFPNELPIAGEPANIVALVEEYMDWLHQSPVPKLLFWGTPGVLIPPAEAARLAKSLPNCKAVDIGPGLNLLQEDNPDLIGSEIARWLSTLEISG

SEQ ID NO: 17 - protein, 12 aa, Synthetic construct
MAEIGTGFPFDP

SEQ ID NO: 18 - protein, 284 aa, Synthetic construct
YVEVLGERMHYVDVGPRDGTPVLFLHGNPTSSYVWRNIIPHVAPTHRCIAPDLIGMGKSDKPDLGYFFDDHVRFMDAFIEALGLEEVVLVIHDWGSALGFHWAKRNPERVKGIAFMEFIRPIPTWDEWPEFARETFQAFRTTDVGRKLIIDQNVFIEGTLPMGVVRPLTEVEMDHYREPFLNPVDREPLWRFPNELPIAGEPANIVALVEEYMDWLHQSPVPKLLFWGTPGVLIPPAEAARLAKSLPNCKAVDIGPGLNLLQEDNPDLIGSEIARWLSTLEISG

SEQ ID NO: 19 - protein, 13 aa, Synthetic construct
MAEIGTGFPFDPH

SEQ ID NO: 20 - protein, 283 aa, Synthetic construct
VEVLGERMHYVDVGPRDGTPVLFLHGNPTSSYVWRNIIPHVAPTHRCIAPDLIGMGKSDKPDLGYFFDDHVRFMDAFIEALGLEEVVLVIHDWGSALGFHWAKRNPERVKGIAFMEFIRPIPTWDEWPEFARETFQAFRTTDVGRKLIIDQNVFIEGTLPMGVVRPLTEVEMDHYREPFLNPVDREPLWRFPNELPIAGEPANIVALVEEYMDWLHQSPVPKLLFWGTPGVLIPPAEAARLAKSLPNCKAVDIGPGLNLLQEDNPDLIGSEIARWLSTLEISG

SEQ ID NO: 21 - protein, 14 aa, Synthetic construct
MAEIGTGFPFDPHY

SEQ ID NO: 22 - protein, 282 aa, Synthetic construct
EVLGERMHYVDVGPRDGTPVLFLHGNPTSSYVWRNIIPHVAPTHRCIAPDLIGMGKSDKPDLGYFFDDHVRFMDAFIEALGLEEVVLVIHDWGSALGFHWAKRNPERVKGIAFMEFIRPIPTWDEWPEFARETFQAFRTTDVGRKLIIDQNVFIEGTLPMGVVRPLTEVEMDHYREPFLNPVDREPLWRFPNELPIAGEPANIVALVEEYMDWLHQSPVPKLLFWGTPGVLIPPAEAARLAKSLPNCKAVDIGPGLNLLQEDNPDLIGSEIARWLSTLEISG

SEQ ID NO: 23 - protein, 15 aa, Synthetic construct
MAEIGTGFPFDPHYV

SEQ ID NO: 24 - protein, 281 aa, Synthetic construct
VLGERMHYVDVGPRDGTPVLFLHGNPTSSYVWRNIIPHVAPTHRCIAPDLIGMGKSDKPDLGYFFDDHVRFMDAFIEALGLEEVVLVIHDWGSALGFHWAKRNPERVKGIAFMEFIRPIPTWDEWPEFARETFQAFRTTDVGRKLIIDQNVFIEGTLPMGVVRPLTEVEMDHYREPFLNPVDREPLWRFPNELPIAGEPANIVALVEEYMDWLHQSPVPKLLFWGTPGVLIPPAEAARLAKSLPNCKAVDIGPGLNLLQEDNPDLIGSEIARWLSTLEISG

SEQ ID NO: 25 - protein, 16 aa, Synthetic construct
MAEIGTGFPFDPHYVE

SEQ ID NO: 26 - protein, 280 aa, Synthetic construct
LGERMHYVDVGPRDGTPVLFLHGNPTSSYVWRNIIPHVAPTHRCIAPDLIGMGKSDKPDLGYFFDDHVRFMDAFIEALGLEEVVLVIHDWGSALGFHWAKRNPERVKGIAFMEFIRPIPTWDEWPEFARETFQAFRTTDVGRKLIIDQNVFIEGTLPMGVVRPLTEVEMDHYREPFLNPVDREPLWRFPNELPIAGEPANIVALVEEYMDWLHQSPVPKLLFWGTPGVLIPPAEAARLAKSLPNCKAVDIGPGLNLLQEDNPDLIGSEIARWLSTLEISG

SEQ ID NO: 27 - protein, 17 aa, Synthetic construct
MAEIGTGFPFDPHYVEV

SEQ ID NO: 28 - protein, 279 aa, Synthetic construct
GERMHYVDVGPRDGTPVLFLHGNPTSSYVWRNIIPHVAPTHRCIAPDLIGMGKSDKPDLGYFFDDHVRFMDAFIEALGLEEVVLVIHDWGSALGFHWAKRNPERVKGIAFMEFIRPIPTWDEWPEFARETFQAFRTTDVGRKLIIDQNVFIEGTLPMGVVRPLTEVEMDHYREPFLNPVDREPLWRFPNELPIAGEPANIVALVEEYMDWLHQSPVPKLLFWGTPGVLIPPAEAARLAKSLPNCKAVDIGPGLNLLQEDNPDLIGSEIARWLSTLEISG

SEQ ID NO: 29 - protein, 18 aa, Synthetic construct
MAEIGTGFPFDPHYVEVL

SEQ ID NO: 30 - protein, 278 aa, Synthetic construct
ERMHYVDVGPRDGTPVLFLHGNPTSSYVWRNIIPHVAPTHRCIAPDLIGMGKSDKPDLGYFFDDHVRFMDAFIEALGLEEVVLVIHDWGSALGFHWAKRNPERVKGIAFMEFIRPIPTWDEWPEFARETFQAFRTTDVGRKLIIDQNVFIEGTLPMGVVRPLTEVEMDHYREPFLNPVDREPLWRFPNELPIAGEPANIVALVEEYMDWLHQSPVPKLLFWGTPGVLIPPAEAARLAKSLPNCKAVDIGPGLNLLQEDNPDLIGSEIARWLSTLEISG

SEQ ID NO: 31 - protein, 19 aa, Synthetic construct
MAEIGTGFPFDPHYVEVLG

SEQ ID NO: 32 - protein, 277 aa, Synthetic construct
RMHYVDVGPRDGTPVLFLHGNPTSSYVWRNIIPHVAPTHRCIAPDLIGMGKSDKPDLGYFFDDHVRFMDAFIEALGLEEVVLVIHDWGSALGFHWAKRNPERVKGIAFMEFIRPIPTWDEWPEFARETFQAFRTTDVGRKLIIDQNVFIEGTLPMGVVRPLTEVEMDHYREPFLNPVDREPLWRFPNELPIAGEPANIVALVEEYMDWLHQSPVPKLLFWGTPGVLIPPAEAARLAKSLPNCKAVDIGPGLNLLQEDNPDLIGSEIARWLSTLEISG

SEQ ID NO: 33 - protein, 20 aa, Synthetic construct
MAEIGTGFPFDPHYVEVLGE

SEQ ID NO: 34 - protein, 276 aa, Synthetic construct
MHYVDVGPRDGTPVLFLHGNPTSSYVWRNIIPHVAPTHRCIAPDLIGMGKSDKPDLGYFFDDHVRFMDAFIEALGLEEVVLVIHDWGSALGFHWAKRNPERVKGIAFMEFIRPIPTWDEWPEFARETFQAFRTTDVGRKLIIDQNVFIEGTLPMGVVRPLTEVEMDHYREPFLNPVDREPLWRFPNELPIAGEPANIVALVEEYMDWLHQSPVPKLLFWGTPGVLIPPAEAARLAKSLPNCKAVDIGPGLNLLQEDNPDLIGSEIARWLSTLEISG

SEQ ID NO: 35 - protein, 21 aa, Synthetic construct
MAEIGTGFPFDPHYVEVLGER

SEQ ID NO: 36 - protein, 275 aa, Synthetic construct
HYVDVGPRDGTPVLFLHGNPTSSYVWRNIIPHVAPTHRCIAPDLIGMGKSDKPDLGYFFDDHVRFMDAFIEALGLEEVVLVIHDWGSALGFHWAKRNPERVKGIAFMEFIRPIPTWDEWPEFARETFQAFRTTDVGRKLIIDQNVFIEGTLPMGVVRPLTEVEMDHYREPFLNPVDREPLWRFPNELPIAGEPANIVALVEEYMDWLHQSPVPKLLFWGTPGVLIPPAEAARLAKSLPNCKAVDIGPGLNLLQEDNPDLIGSEIARWLSTLEISG

SEQ ID NO: 37 - protein, 22 aa, Synthetic construct
MAEIGTGFPFDPHYVEVLGERM

SEQ ID NO: 38 - protein, 274 aa, Synthetic construct
YVDVGPRDGTPVLFLHGNPTSSYVWRNIIPHVAPTHRCIAPDLIGMGKSDKPDLGYFFDDHVRFMDAFIEALGLEEVVLVIHDWGSALGFHWAKRNPERVKGIAFMEFIRPIPTWDEWPEFARETFQAFRTTDVGRKLIIDQNVFIEGTLPMGVVRPLTEVEMDHYREPFLNPVDREPLWRFPNELPIAGEPANIVALVEEYMDWLHQSPVPKLLFWGTPGVLIPPAEAARLAKSLPNCKAVDIGPGLNLLQEDNPDLIGSEIARWLSTLEISG

SEQ ID NO: 39 - protein, 23 aa, Synthetic construct
MAEIGTGFPFDPHYVEVLGERMH

SEQ ID NO: 40 - protein, 273 aa, Synthetic construct
VDVGPRDGTPVLFLHGNPTSSYVWRNIIPHVAPTHRCIAPDLIGMGKSDKPDLGYFFDDHVRFMDAFIEALGLEEVVLVIHDWGSALGFHWAKRNPERVKGIAFMEFIRPIPTWDEWPEFARETFQAFRTTDVGRKLIIDQNVFIEGTLPMGVVRPLTEVEMDHYREPFLNPVDREPLWRFPNELPIAGEPANIVALVEEYMDWLHQSPVPKLLFWGTPGVLIPPAEAARLAKSLPNCKAVDIGPGLNLLQEDNPDLIGSEIARWLSTLEISG

SEQ ID NO: 41 - protein, 24 aa, Synthetic construct
MAEIGTGFPFDPHYVEVLGERMHY

SEQ ID NO: 42 - protein, 272 aa, Synthetic construct
DVGPRDGTPVLFLHGNPTSSYVWRNIIPHVAPTHRCIAPDLIGMGKSDKPDLGYFFDDHVRFMDAFIEALGLEEVVLVIHDWGSALGFHWAKRNPERVKGIAFMEFIRPIPTWDEWPEFARETFQAFRTTDVGRKLIIDQNVFIEGTLPMGVVRPLTEVEMDHYREPFLNPVDREPLWRFPNELPIAGEPANIVALVEEYMDWLHQSPVPKLLFWGTPGVLIPPAEAARLAKSLPNCKAVDIGPGLNLLQEDNPDLIGSEIARWLSTLEISG

SEQ ID NO: 43 - protein, 25 aa, Synthetic construct
MAEIGTGFPFDPHYVEVLGERMHYV

SEQ ID NO: 44 - protein, 271 aa, Synthetic construct
VGPRDGTPVLFLHGNPTSSYVWRNIIPHVAPTHRCIAPDLIGMGKSDKPDLGYFFDDHVRFMDAFIEALGLEEVVLVIHDWGSALGFHWAKRNPERVKGIAFMEFIRPIPTWDEWPEFARETFQAFRTTDVGRKLIIDQNVFIEGTLPMGVVRPLTEVEMDHYREPFLNPVDREPLWRFPNELPIAGEPANIVALVEEYMDWLHQSPVPKLLFWGTPGVLIPPAEAARLAKSLPNCKAVDIGPGLNLLQEDNPDLIGSEIARWLSTLEISG

SEQ ID NO: 45 - protein, 26 aa, Synthetic construct
MAEIGTGFPFDPHYVEVLGERMHYVD

SEQ ID NO: 46 - protein, 270 aa, Synthetic construct
GPRDGTPVLFLHGNPTSSYVWRNIIPHVAPTHRCIAPDLIGMGKSDKPDLGYFFDDHVRFMDAFIEALGLEEVVLVIHDWGSALGFHWAKRNPERVKGIAFMEFIRPIPTWDEWPEFARETFQAFRTTDVGRKLIIDQNVFIEGTLPMGVVRPLTEVEMDHYREPFLNPVDREPLWRFPNELPIAGEPANIVALVEEYMDWLHQSPVPKLLFWGTPGVLIPPAEAARLAKSLPNCKAVDIGPGLNLLQEDNPDLIGSEIARWLSTLEISG

SEQ ID NO: 47 - protein, 27 aa, Synthetic construct
MAEIGTGFPFDPHYVEVLGERMHYVDV

SEQ ID NO: 48 - protein, 269 aa, Synthetic construct
PRDGTPVLFLHGNPTSSYVWRNIIPHVAPTHRCIAPDLIGMGKSDKPDLGYFFDDHVRFMDAFIEALGLEEVVLVIHDWGSALGFHWAKRNPERVKGIAFMEFIRPIPTWDEWPEFARETFQAFRTTDVGRKLIIDQNVFIEGTLPMGVVRPLTEVEMDHYREPFLNPVDREPLWRFPNELPIAGEPANIVALVEEYMDWLHQSPVPKLLFWGTPGVLIPPAEAARLAKSLPNCKAVDIGPGLNLLQEDNPDLIGSEIARWLSTLEISG

SEQ ID NO: 49 - protein, 28 aa, Synthetic construct
MAEIGTGFPFDPHYVEVLGERMHYVDVG

SEQ ID NO: 50 - protein, 268 aa, Synthetic construct
RDGTPVLFLHGNPTSSYVWRNIIPHVAPTHRCIAPDLIGMGKSDKPDLGYFFDDHVRFMDAFIEALGLEEVVLVIHDWGSALGFHWAKRNPERVKGIAFMEFIRPIPTWDEWPEFARETFQAFRTTDVGRKLIIDQNVFIEGTLPMGVVRPLTEVEMDHYREPFLNPVDREPLWRFPNELPIAGEPANIVALVEEYMDWLHQSPVPKLLFWGTPGVLIPPAEAARLAKSLPNCKAVDIGPGLNLLQEDNPDLIGSEIARWLSTLEISG

SEQ ID NO: 51 - protein, 29 aa, Synthetic construct
MAEIGTGFPFDPHYVEVLGERMHYVDVGP

SEQ ID NO: 52 - protein, 267 aa, Synthetic construct
DGTPVLFLHGNPTSSYVWRNIIPHVAPTHRCIAPDLIGMGKSDKPDLGYFFDDHVRFMDAFIEALGLEEVVLVIHDWGSALGFHWAKRNPERVKGIAFMEFIRPIPTWDEWPEFARETFQAFRTTDVGRKLIIDQNVFIEGTLPMGVVRPLTEVEMDHYREPFLNPVDREPLWRFPNELPIAGEPANIVALVEEYMDWLHQSPVPKLLFWGTPGVLIPPAEAARLAKSLPNCKAVDIGPGLNLLQEDNPDLIGSEIARWLSTLEISG

SEQ ID NO: 53 - protein, 30 aa, Synthetic construct
MAEIGTGFPFDPHYVEVLGERMHYVDVGPR

SEQ ID NO: 54 - protein, 266 aa, Synthetic construct
GTPVLFLHGNPTSSYVWRNIIPHVAPTHRCIAPDLIGMGKSDKPDLGYFFDDHVRFMDAFIEALGLEEVVLVIHDWGSALGFHWAKRNPERVKGIAFMEFIRPIPTWDEWPEFARETFQAFRTTDVGRKLIIDQNVFIEGTLPMGVVRPLTEVEMDHYREPFLNPVDREPLWRFPNELPIAGEPANIVALVEEYMDWLHQSPVPKLLFWGTPGVLIPPAEAARLAKSLPNCKAVDIGPGLNLLQEDNPDLIGSEIARWLSTLEISG

SEQ ID NO: 55 - protein, 31 aa, Synthetic construct
MAEIGTGFPFDPHYVEVLGERMHYVDVGPRD

SEQ ID NO: 56 - protein, 265 aa, Synthetic construct
TPVLFLHGNPTSSYVWRNIIPHVAPTHRCIAPDLIGMGKSDKPDLGYFFDDHVRFMDAFIEALGLEEVVLVIHDWGSALGFHWAKRNPERVKGIAFMEFIRPIPTWDEWPEFARETFQAFRTTDVGRKLIIDQNVFIEGTLPMGVVRPLTEVEMDHYREPFLNPVDREPLWRFPNELPIAGEPANIVALVEEYMDWLHQSPVPKLLFWGTPGVLIPPAEAARLAKSLPNCKAVDIGPGLNLLQEDNPDLIGSEIARWLSTLEISG

SEQ ID NO: 57 - protein, 32 aa, Synthetic construct
MAEIGTGFPFDPHYVEVLGERMHYVDVGPRDG

SEQ ID NO: 58 - protein, 264 aa, Synthetic construct
PVLFLHGNPTSSYVWRNIIPHVAPTHRCIAPDLIGMGKSDKPDLGYFFDDHVRFMDAFIEALGLEEVVLVIHDWGSALGFHWAKRNPERVKGIAFMEFIRPIPTWDEWPEFARETFQAFRTTDVGRKLIIDQNVFIEGTLPMGVVRPLTEVEMDHYREPFLNPVDREPLWRFPNELPIAGEPANIVALVEEYMDWLHQSPVPKLLFWGTPGVLIPPAEAARLAKSLPNCKAVDIGPGLNLLQEDNPDLIGSEIARWLSTLEISG

SEQ ID NO: 59 - protein, 33 aa, Synthetic construct
MAEIGTGFPFDPHYVEVLGERMHYVDVGPRDGT

SEQ ID NO: 60 - protein, 263 aa, Synthetic construct
VLFLHGNPTSSYVWRNIIPHVAPTHRCIAPDLIGMGKSDKPDLGYFFDDHVRFMDAFIEALGLEEVVLVIHDWGSALGFHWAKRNPERVKGIAFMEFIRPIPTWDEWPEFARETFQAFRTTDVGRKLIIDQNVFIEGTLPMGVVRPLTEVEMDHYREPFLNPVDREPLWRFPNELPIAGEPANIVALVEEYMDWLHQSPVPKLLFWGTPGVLIPPAEAARLAKSLPNCKAVDIGPGLNLLQEDNPDLIGSEIARWLSTLEISG

SEQ ID NO: 61 - protein, 34 aa, Synthetic construct
MAEIGTGFPFDPHYVEVLGERMHYVDVGPRDGTP

SEQ ID NO: 62 - protein, 262 aa, Synthetic construct
LFLHGNPTSSYVWRNIIPHVAPTHRCIAPDLIGMGKSDKPDLGYFFDDHVRFMDAFIEALGLEEVVLVIHDWGSALGFHWAKRNPERVKGIAFMEFIRPIPTWDEWPEFARETFQAFRTTDVGRKLIIDQNVFIEGTLPMGVVRPLTEVEMDHYREPFLNPVDREPLWRFPNELPIAGEPANIVALVEEYMDWLHQSPVPKLLFWGTPGVLIPPAEAARLAKSLPNCKAVDIGPGLNLLQEDNPDLIGSEIARWLSTLEISG

SEQ ID NO: 63 - protein, 35 aa, Synthetic construct
MAEIGTGFPFDPHYVEVLGERMHYVDVGPRDGTPV

SEQ ID NO: 64 - protein, 261 aa, Synthetic construct
FLHGNPTSSYVWRNIIPHVAPTHRCIAPDLIGMGKSDKPDLGYFFDDHVRFMDAFIEALGLEEVVLVIHDWGSALGFHWAKRNPERVKGIAFMEFIRPIPTWDEWPEFARETFQAFRTTDVGRKLIIDQNVFIEGTLPMGVVRPLTEVEMDHYREPFLNPVDREPLWRFPNELPIAGEPANIVALVEEYMDWLHQSPVPKLLFWGTPGVLIPPAEAARLAKSLPNCKAVDIGPGLNLLQEDNPDLIGSEIARWLSTLEISG

SEQ ID NO: 65 - protein, 36 aa, Synthetic construct
MAEIGTGFPFDPHYVEVLGERMHYVDVGPRDGTPVL

SEQ ID NO: 66 - protein, 260 aa, Synthetic construct
LHGNPTSSYVWRNIIPHVAPTHRCIAPDLIGMGKSDKPDLGYFFDDHVRFMDAFIEALGLEEVVLVIHDWGSALGFHWAKRNPERVKGIAFMEFIRPIPTWDEWPEFARETFQAFRTTDVGRKLIIDQNVFIEGTLPMGVVRPLTEVEMDHYREPFLNPVDREPLWRFPNELPIAGEPANIVALVEEYMDWLHQSPVPKLLFWGTPGVLIPPAEAARLAKSLPNCKAVDIGPGLNLLQEDNPDLIGSEIARWLSTLEISG

SEQ ID NO: 67 - protein, 37 aa, Synthetic construct
MAEIGTGFPFDPHYVEVLGERMHYVDVGPRDGTPVLF

SEQ ID NO: 68 - protein, 259 aa, Synthetic construct
HGNPTSSYVWRNIIPHVAPTHRCIAPDLIGMGKSDKPDLGYFFDDHVRFMDAFIEALGLEEVVLVIHDWGSALGFHWAKRNPERVKGIAFMEFIRPIPTWDEWPEFARETFQAFRTTDVGRKLIIDQNVFIEGTLPMGVVRPLTEVEMDHYREPFLNPVDREPLWRFPNELPIAGEPANIVALVEEYMDWLHQSPVPKLLFWGTPGVLIPPAEAARLAKSLPNCKAVDIGPGLNLLQEDNPDLIGSEIARWLSTLEISG

SEQ ID NO: 69 - protein, 38 aa, Synthetic construct
MAEIGTGFPFDPHYVEVLGERMHYVDVGPRDGTPVLFL

SEQ ID NO: 70 - protein, 258 aa, Synthetic construct
GNPTSSYVWRNIIPHVAPTHRCIAPDLIGMGKSDKPDLGYFFDDHVRFMDAFIEALGLEEVVLVIHDWGSALGFHWAKRNPERVKGIAFMEFIRPIPTWDEWPEFARETFQAFRTTDVGRKLIIDQNVFIEGTLPMGVVRPLTEVEMDHYREPFLNPVDREPLWRFPNELPIAGEPANIVALVEEYMDWLHQSPVPKLLFWGTPGVLIPPAEAARLAKSLPNCKAVDIGPGLNLLQEDNPDLIGSEIARWLSTLEISG

SEQ ID NO: 71 - protein, 39 aa, Synthetic construct
MAEIGTGFPFDPHYVEVLGERMHYVDVGPRDGTPVLFLH

SEQ ID NO: 72 - protein, 257 aa, Synthetic construct
NPTSSYVWRNIIPHVAPTHRCIAPDLIGMGKSDKPDLGYFFDDHVRFMDAFIEALGLEEVVLVIHDWGSALGFHWAKRNPERVKGIAFMEFIRPIPTWDEWPEFARETFQAFRTTDVGRKLIIDQNVFIEGTLPMGVVRPLTEVEMDHYREPFLNPVDREPLWRFPNELPIAGEPANIVALVEEYMDWLHQSPVPKLLFWGTPGVLIPPAEAARLAKSLPNCKAVDIGPGLNLLQEDNPDLIGSEIARWLSTLEISG

SEQ ID NO: 73 - protein, 40 aa, Synthetic construct
MAEIGTGFPFDPHYVEVLGERMHYVDVGPRDGTPVLFLHG

SEQ ID NO: 74 - protein, 256 aa, Synthetic construct
PTSSYVWRNIIPHVAPTHRCIAPDLIGMGKSDKPDLGYFFDDHVRFMDAFIEALGLEEVVLVIHDWGSALGFHWAKRNPERVKGIAFMEFIRPIPTWDEWPEFARETFQAFRTTDVGRKLIIDQNVFIEGTLPMGVVRPLTEVEMDHYREPFLNPVDREPLWRFPNELPIAGEPANIVALVEEYMDWLHQSPVPKLLFWGTPGVLIPPAEAARLAKSLPNCKAVDIGPGLNLLQEDNPDLIGSEIARWLSTLEISG

SEQ ID NO: 75 - protein, 41 aa, Synthetic construct
MAEIGTGFPFDPHYVEVLGERMHYVDVGPRDGTPVLFLHGN

SEQ ID NO: 76 - protein, 255 aa, Synthetic construct
TSSYVWRNIIPHVAPTHRCIAPDLIGMGKSDKPDLGYFFDDHVRFMDAFIEALGLEEVVLVIHDWGSALGFHWAKRNPERVKGIAFMEFIRPIPTWDEWPEFARETFQAFRTTDVGRKLIIDQNVFIEGTLPMGVVRPLTEVEMDHYREPFLNPVDREPLWRFPNELPIAGEPANIVALVEEYMDWLHQSPVPKLLFWGTPGVLIPPAEAARLAKSLPNCKAVDIGPGLNLLQEDNPDLIGSEIARWLSTLEISG

SEQ ID NO: 77 - protein, 42 aa, Synthetic construct
MAEIGTGFPFDPHYVEVLGERMHYVDVGPRDGTPVLFLHGNP

SEQ ID NO: 78 - protein, 254 aa, Synthetic construct
SSYVWRNIIPHVAPTHRCIAPDLIGMGKSDKPDLGYFFDDHVRFMDAFIEALGLEEVVLVIHDWGSALGFHWAKRNPERVKGIAFMEFIRPIPTWDEWPEFARETFQAFRTTDVGRKLIIDQNVFIEGTLPMGVVRPLTEVEMDHYREPFLNPVDREPLWRFPNELPIAGEPANIVALVEEYMDWLHQSPVPKLLFWGTPGVLIPPAEAARLAKSLPNCKAVDIGPGLNLLQEDNPDLIGSEIARWLSTLEISG

SEQ ID NO: 79 - protein, 43 aa, Synthetic construct
MAEIGTGFPFDPHYVEVLGERMHYVDVGPRDGTPVLFLHGNPT

SEQ ID NO: 80 - protein, 253 aa, Synthetic construct
SYVWRNIIPHVAPTHRCIAPDLIGMGKSDKPDLGYFFDDHVRFMDAFIEALGLEEVVLVIHDWGSALGFHWAKRNPERVKGIAFMEFIRPIPTWDEWPEFARETFQAFRTTDVGRKLIIDQNVFIEGTLPMGVVRPLTEVEMDHYREPFLNPVDREPLWRFPNELPIAGEPANIVALVEEYMDWLHQSPVPKLLFWGTPGVLIPPAEAARLAKSLPNCKAVDIGPGLNLLQEDNPDLIGSEIARWLSTLEISG

SEQ ID NO: 81 - protein, 44 aa, Synthetic construct
MAEIGTGFPFDPHYVEVLGERMHYVDVGPRDGTPVLFLHGNPTS

SEQ ID NO: 82 - protein, 252 aa, Synthetic construct
YVWRNIIPHVAPTHRCIAPDLIGMGKSDKPDLGYFFDDHVRFMDAFIEALGLEEVVLVIHDWGSALGFHWAKRNPERVKGIAFMEFIRPIPTWDEWPEFARETFQAFRTTDVGRKLIIDQNVFIEGTLPMGVVRPLTEVEMDHYREPFLNPVDREPLWRFPNELPIAGEPANIVALVEEYMDWLHQSPVPKLLFWGTPGVLIPPAEAARLAKSLPNCKAVDIGPGLNLLQEDNPDLIGSEIARWLSTLEISG

SEQ ID NO: 83 - protein, 45 aa, Synthetic construct
MAEIGTGFPFDPHYVEVLGERMHYVDVGPRDGTPVLFLHGNPTSS

SEQ ID NO: 84 - protein, 251 aa, Synthetic construct
VWRNIIPHVAPTHRCIAPDLIGMGKSDKPDLGYFFDDHVRFMDAFIEALGLEEVVLVIHDWGSALGFHWAKRNPERVKGIAFMEFIRPIPTWDEWPEFARETFQAFRTTDVGRKLIIDQNVFIEGTLPMGVVRPLTEVEMDHYREPFLNPVDREPLWRFPNELPIAGEPANIVALVEEYMDWLHQSPVPKLLFWGTPGVLIPPAEAARLAKSLPNCKAVDIGPGLNLLQEDNPDLIGSEIARWLSTLEISG

SEQ ID NO: 85 - protein, 46 aa, Synthetic construct
MAEIGTGFPFDPHYVEVLGERMHYVDVGPRDGTPVLFLHGNPTSSY

SEQ ID NO: 86 - protein, 250 aa, Synthetic construct
WRNIIPHVAPTHRCIAPDLIGMGKSDKPDLGYFFDDHVRFMDAFIEALGLEEVVLVIHDWGSALGFHWAKRNPERVKGIAFMEFIRPIPTWDEWPEFARETFQAFRTTDVGRKLIIDQNVFIEGTLPMGVVRPLTEVEMDHYREPFLNPVDREPLWRFPNELPIAGEPANIVALVEEYMDWLHQSPVPKLLFWGTPGVLIPPAEAARLAKSLPNCKAVDIGPGLNLLQEDNPDLIGSEIARWLSTLEISG

SEQ ID NO: 87 - protein, 47 aa, Synthetic construct
MAEIGTGFPFDPHYVEVLGERMHYVDVGPRDGTPVLFLHGNPTSSYV

SEQ ID NO: 88 - protein, 249 aa, Synthetic construct
RNIIPHVAPTHRCIAPDLIGMGKSDKPDLGYFFDDHVRFMDAFIEALGLEEVVLVIHDWGSALGFHWAKRNPERVKGIAFMEFIRPIPTWDEWPEFARETFQAFRTTDVGRKLIIDQNVFIEGTLPMGVVRPLTEVEMDHYREPFLNPVDREPLWRFPNELPIAGEPANIVALVEEYMDWLHQSPVPKLLFWGTPGVLIPPAEAARLAKSLPNCKAVDIGPGLNLLQEDNPDLIGSEIARWLSTLEISG

SEQ ID NO: 89 - protein, 49 aa, Synthetic construct
DMAEIGTGFPFDPHYVEVLGERMHYVDVGPRDGTPVLFLHGNPTSSYVW

SEQ ID NO: 90 - protein, 248 aa, Synthetic construct
NIIPHVAPTHRCIAPDLIGMGKSDKPDLGYFFDDHVRFMDAFIEALGLEEVVLVIHDWGSALGFHWAKRNPERVKGIAFMEFIRPIPTWDEWPEFARETFQAFRTTDVGRKLIIDQNVFIEGTLPMGVVRPLTEVEMDHYREPFLNPVDREPLWRFPNELPIAGEPANIVALVEEYMDWLHQSPVPKLLFWGTPGVLIPPAEAARLAKSLPNCKAVDIGPGLNLLQEDNPDLIGSEIARWLSTLEISG

SEQ ID NO: 91 - protein, 49 aa, Synthetic construct
MAEIGTGFPFDPHYVEVLGERMHYVDVGPRDGTPVLFLHGNPTSSYVWR

SEQ ID NO: 92 - protein, 247 aa, Synthetic construct
IIPHVAPTHRCIAPDLIGMGKSDKPDLGYFFDDHVRFMDAFIEALGLEEVVLVIHDWGSALGFHWAKRNPERVKGIAFMEFIRPIPTWDEWPEFARETFQAFRTTDVGRKLIIDQNVFIEGTLPMGVVRPLTEVEMDHYREPFLNPVDREPLWRFPNELPIAGEPANIVALVEEYMDWLHQSPVPKLLFWGTPGVLIPPAEAARLAKSLPNCKAVDIGPGLNLLQEDNPDLIGSEIARWLSTLEISG

SEQ ID NO: 93 - protein, 50 aa, Synthetic construct
MAEIGTGFPFDPHYVEVLGERMHYVDVGPRDGTPVLFLHGNPTSSYVWRN

SEQ ID NO: 94 - protein, 246 aa, Synthetic construct
IPHVAPTHRCIAPDLIGMGKSDKPDLGYFFDDHVRFMDAFIEALGLEEVVLVIHDWGSALGFHWAKRNPERVKGIAFMEFIRPIPTWDEWPEFARETFQAFRTTDVGRKLIIDQNVFIEGTLPMGVVRPLTEVEMDHYREPFLNPVDREPLWRFPNELPIAGEPANIVALVEEYMDWLHQSPVPKLLFWGTPGVLIPPAEAARLAKSLPNCKAVDIGPGLNLLQEDNPDLIGSEIARWLSTLEISG

SEQ ID NO: 95 - protein, 51 aa, Synthetic construct
MAEIGTGFPFDPHYVEVLGERMHYVDVGPRDGTPVLFLHGNPTSSYVWRNI

SEQ ID NO: 96 - protein, 245 aa, Synthetic construct
PHVAPTHRCIAPDLIGMGKSDKPDLGYFFDDHVRFMDAFIEALGLEEVVLVIHDWGSALGFHWAKRNPERVKGIAFMEFIRPIPTWDEWPEFARETFQAFRTTDVGRKLIIDQNVFIEGTLPMGVVRPLTEVEMDHYREPFLNPVDREPLWRFPNELPIAGEPANIVALVEEYMDWLHQSPVPKLLFWGTPGVLIPPAEAARLAKSLPNCKAVDIGPGLNLLQEDNPDLIGSEIARWLSTLEISG

SEQ ID NO: 97 - protein, 52 aa, Synthetic construct
MAEIGTGFPFDPHYVEVLGERMHYVDVGPRDGTPVLFLHGNPTSSYVWRNII

SEQ ID NO: 98 - protein, 244 aa, Synthetic construct
HVAPTHRCIAPDLIGMGKSDKPDLGYFFDDHVRFMDAFIEALGLEEVVLVIHDWGSALGFHWAKRNPERVKGIAFMEFIRPIPTWDEWPEFARETFQAFRTTDVGRKLIIDQNVFIEGTLPMGVVRPLTEVEMDHYREPFLNPVDREPLWRFPNELPIAGEPANIVALVEEYMDWLHQSPVPKLLFWGTPGVLIPPAEAARLAKSLPNCKAVDIGPGLNLLQEDNPDLIGSEIARWLSTLEISG

SEQ ID NO: 99 - protein, 53 aa, Synthetic construct
MAEIGTGFPFDPHYVEVLGERMHYVDVGPRDGTPVLFLHGNPTSSYVWRNIIP

SEQ ID NO: 100 - protein, 243 aa, Synthetic construct
VAPTHRCIAPDLIGMGKSDKPDLGYFFDDHVRFMDAFIEALGLEEVVLVIHDWGSALGFHWAKRNPERVKGIAFMEFIRPIPTWDEWPEFARETFQAFRTTDVGRKLIIDQNVFIEGTLPMGVVRPLTEVEMDHYREPFLNPVDREPLWRFPNELPIAGEPANIVALVEEYMDWLHQSPVPKLLFWGTPGVLIPPAEAARLAKSLPNCKAVDIGPGLNLLQEDNPDLIGSEIARWLSTLEISG

SEQ ID NO: 101 - protein, 54 aa, Synthetic construct
MAEIGTGFPFDPHYVEVLGERMHYVDVGPRDGTPVLFLHGNPTSSYVWRNIIPH

SEQ ID NO: 102 - protein, 242 aa, Synthetic construct
APTHRCIAPDLIGMGKSDKPDLGYFFDDHVRFMDAFIEALGLEEVVLVIHDWGSALGFHWAKRNPERVKGIAFMEFIRPIPTWDEWPEFARETFQAFRTTDVGRKLIIDQNVFIEGTLPMGVVRPLTEVEMDHYREPFLNPVDREPLWRFPNELPIAGEPANIVALVEEYMDWLHQSPVPKLLFWGTPGVLIPPAEAARLAKSLPNCKAVDIGPGLNLLQEDNPDLIGSEIARWLSTLEISG

SEQ ID NO: 103 - protein, 55 aa, Synthetic construct
MAEIGTGFPFDPHYVEVLGERMHYVDVGPRDGTPVLFLHGNPTSSYVWRNIIPHV

SEQ ID NO: 104 - protein, 241 aa, Synthetic construct
PTHRCIAPDLIGMGKSDKPDLGYFFDDHVRFMDAFIEALGLEEVVLVIHDWGSALGFHWAKRNPERVKGIAFMEFIRPIPTWDEWPEFARETFQAFRTTDVGRKLIIDQNVFIEGTLPMGVVRPLTEVEMDHYREPFLNPVDREPLWRFPNELPIAGEPANIVALVEEYMDWLHQSPVPKLLFWGTPGVLIPPAEAARLAKSLPNCKAVDIGPGLNLLQEDNPDLIGSEIARWLSTLEISG

SEQ ID NO: 105 - protein, 56 aa, Synthetic construct
MAEIGTGFPFDPHYVEVLGERMHYVDVGPRDGTPVLFLHGNPTSSYVWRNIIPHVA

SEQ ID NO: 106 - protein, 240 aa, Synthetic construct
THRCIAPDLIGMGKSDKPDLGYFFDDHVRFMDAFIEALGLEEVVLVIHDWGSALGFHWAKRNPERVKGIAFMEFIRPIPTWDEWPEFARETFQAFRTTDVGRKLIIDQNVFIEGTLPMGVVRPLTEVEMDHYREPFLNPVDREPLWRFPNELPIAGEPANIVALVEEYMDWLHQSPVPKLLFWGTPGVLIPPAEAARLAKSLPNCKAVDIGPGLNLLQEDNPDLIGSEIARWLSTLEISG

SEQ ID NO: 107 - protein, 57 aa, Synthetic construct
MAEIGTGFPFDPHYVEVLGERMHYVDVGPRDGTPVLFLHGNPTSSYVWRNIIPHVAP

SEQ ID NO: 108 - protein, 239 aa, Synthetic construct
HRCIAPDLIGMGKSDKPDLGYFFDDHVRFMDAFIEALGLEEVVLVIHDWGSALGFHWAKRNPERVKGIAFMEFIRPIPTWDEWPEFARETFQAFRTTDVGRKLIIDQNVFIEGTLPMGVVRPLTEVEMDHYREPFLNPVDREPLWRFPNELPIAGEPANIVALVEEYMDWLHQSPVPKLLFWGTPGVLIPPAEAARLAKSLPNCKAVDIGPGLNLLQEDNPDLIGSEIARWLSTLEISG

SEQ ID NO: 109 - protein, 58 aa, Synthetic construct
MAEIGTGFPFDPHYVEVLGERMHYVDVGPRDGTPVLFLHGNPTSSYVWRNIIPHVAPT

SEQ ID NO: 110 - protein, 238 aa, Synthetic construct
RCIAPDLIGMGKSDKPDLGYFFDDHVRFMDAFIEALGLEEVVLVIHDWGSALGFHWAKRNPERVKGIAFMEFIRPIPTWDEWPEFARETFQAFRTTDVGRKLIIDQNVFIEGTLPMGVVRPLTEVEMDHYREPFLNPVDREPLWRFPNELPIAGEPANIVALVEEYMDWLHQSPVPKLLFWGTPGVLIPPAEAARLAKSLPNCKAVDIGPGLNLLQEDNPDLIGSEIARWLSTLEISG

SEQ ID NO: 111 - protein, 59 aa, Synthetic construct
MAEIGTGFPFDPHYVEVLGERMHYVDVGPRDGTPVLFLHGNPTSSYVWRNIIPHVAPTH

SEQ ID NO: 112 - protein, 237 aa, Synthetic construct
CIAPDLIGMGKSDKPDLGYFFDDHVRFMDAFIEALGLEEVVLVIHDWGSALGFHWAKRNPERVKGIAFMEFIRPIPTWDEWPEFARETFQAFRTTDVGRKLIIDQNVFIEGTLPMGVVRPLTEVEMDHYREPFLNPVDREPLWRFPNELPIAGEPANIVALVEEYMDWLHQSPVPKLLFWGTPGVLIPPAEAARLAKSLPNCKAVDIGPGLNLLQEDNPDLIGSEIARWLSTLEISG

SEQ ID NO: 113 - protein, 60 aa, Synthetic construct
MAEIGTGFPFDPHYVEVLGERMHYVDVGPRDGTPVLFLHGNPTSSYVWRNIIPHVAPTHR

SEQ ID NO: 114 - protein, 236 aa, Synthetic construct
IAPDLIGMGKSDKPDLGYFFDDHVRFMDAFIEALGLEEVVLVIHDWGSALGFHWAKRNPERVKGIAFMEFIRPIPTWDEWPEFARETFQAFRTTDVGRKLIIDQNVFIEGTLPMGVVRPLTEVEMDHYREPFLNPVDREPLWRFPNELPIAGEPANIVALVEEYMDWLHQSPVPKLLFWGTPGVLIPPAEAARLAKSLPNCKAVDIGPGLNLLQEDNPDLIGSEIARWLSTLEISG

SEQ ID NO: 115 - protein, 61 aa, Synthetic construct
MAEIGTGFPFDPHYVEVLGERMHYVDVGPRDGTPVLFLHGNPTSSYVWRNIIPHVAPTHRC

SEQ ID NO: 116 - protein, 235 aa, Synthetic construct
APDLIGMGKSDKPDLGYFFDDHVRFMDAFIEALGLEEVVLVIHDWGSALGFHWAKRNPERVKGIAFMEFIRPIPTWDEWPEFARETFQAFRTTDVGRKLIIDQNVFIEGTLPMGVVRPLTEVEMDHYREPFLNPVDREPLWRFPNELPIAGEPANIVALVEEYMDWLHQSPVPKLLFWGTPGVLIPPAEAARLAKSLPNCKAVDIGPGLNLLQEDNPDLIGSEIARWLSTLEISG

SEQ ID NO: 117 - protein, 63 aa, Synthetic construct
XMAEIGTGFPFDPHYVEVLGERMHYVDVGPRDGTPVLFLHGNPTSSYVWRNIIPHVAPTHRCI

SEQ ID NO: 118 - protein, 234 aa, Synthetic construct
PDLIGMGKSDKPDLGYFFDDHVRFMDAFIEALGLEEVVLVIHDWGSALGFHWAKRNPERVKGIAFMEFIRPIPTWDEWPEFARETFQAFRTTDVGRKLIIDQNVFIEGTLPMGVVRPLTEVEMDHYREPFLNPVDREPLWRFPNELPIAGEPANIVALVEEYMDWLHQSPVPKLLFWGTPGVLIPPAEAARLAKSLPNCKAVDIGPGLNLLQEDNPDLIGSEIARWLSTLEISG

SEQ ID NO: 119 - protein, 63 aa, Synthetic construct
MAEIGTGFPFDPHYVEVLGERMHYVDVGPRDGTPVLFLHGNPTSSYVWRNIIPHVAPTHRCIA

SEQ ID NO: 120 - protein, 233 aa, Synthetic construct
DLIGMGKSDKPDLGYFFDDHVRFMDAFIEALGLEEVVLVIHDWGSALGFHWAKRNPERVKGIAFMEFIRPIPTWDEWPEFARETFQAFRTTDVGRKLIIDQNVFIEGTLPMGVVRPLTEVEMDHYREPFLNPVDREPLWRFPNELPIAGEPANIVALVEEYMDWLHQSPVPKLLFWGTPGVLIPPAEAARLAKSLPNCKAVDIGPGLNLLQEDNPDLIGSEIARWLSTLEISG

SEQ ID NO: 121 - protein, 64 aa, Synthetic construct
MAEIGTGFPFDPHYVEVLGERMHYVDVGPRDGTPVLFLHGNPTSSYVWRNIIPHVAPTHRCIAP

SEQ ID NO: 122 - protein, 232 aa, Synthetic construct
LIGMGKSDKPDLGYFFDDHVRFMDAFIEALGLEEVVLVIHDWGSALGFHWAKRNPERVKGIAFMEFIRPIPTWDEWPEFARETFQAFRTTDVGRKLIIDQNVFIEGTLPMGVVRPLTEVEMDHYREPFLNPVDREPLWRFPNELPIAGEPANIVALVEEYMDWLHQSPVPKLLFWGTPGVLIPPAEAARLAKSLPNCKAVDIGPGLNLLQEDNPDLIGSEIARWLSTLEISG

SEQ ID NO: 123 - protein, 65 aa, Synthetic construct
MAEIGTGFPFDPHYVEVLGERMHYVDVGPRDGTPVLFLHGNPTSSYVWRNIIPHVAPTHRCIAPD

SEQ ID NO: 124 - protein, 231 aa, Synthetic construct
IGMGKSDKPDLGYFFDDHVRFMDAFIEALGLEEVVLVIHDWGSALGFHWAKRNPERVKGIAFMEFIRPIPTWDEWPEFARETFQAFRTTDVGRKLIIDQNVFIEGTLPMGVVRPLTEVEMDHYREPFLNPVDREPLWRFPNELPIAGEPANIVALVEEYMDWLHQSPVPKLLFWGTPGVLIPPAEAARLAKSLPNCKAVDIGPGLNLLQEDNPDLIGSEIARWLSTLEISG

SEQ ID NO: 125 - protein, 66 aa, Synthetic construct
MAEIGTGFPFDPHYVEVLGERMHYVDVGPRDGTPVLFLHGNPTSSYVWRNIIPHVAPTHRCIAPDL

SEQ ID NO: 126 - protein, 230 aa, Synthetic construct
GMGKSDKPDLGYFFDDHVRFMDAFIEALGLEEVVLVIHDWGSALGFHWAKRNPERVKGIAFMEFIRPIPTWDEWPEFARETFQAFRTTDVGRKLIIDQNVFIEGTLPMGVVRPLTEVEMDHYREPFLNPVDREPLWRFPNELPIAGEPANIVALVEEYMDWLHQSPVPKLLFWGTPGVLIPPAEAARLAKSLPNCKAVDIGPGLNLLQEDNPDLIGSEIARWLSTLEISG

SEQ ID NO: 127 - protein, 67 aa, Synthetic construct
MAEIGTGFPFDPHYVEVLGERMHYVDVGPRDGTPVLFLHGNPTSSYVWRNIIPHVAPTHRCIAPDLI

SEQ ID NO: 128 - protein, 229 aa, Synthetic construct
MGKSDKPDLGYFFDDHVRFMDAFIEALGLEEVVLVIHDWGSALGFHWAKRNPERVKGIAFMEFIRPIPTWDEWPEFARETFQAFRTTDVGRKLIIDQNVFIEGTLPMGVVRPLTEVEMDHYREPFLNPVDREPLWRFPNELPIAGEPANIVALVEEYMDWLHQSPVPKLLFWGTPGVLIPPAEAARLAKSLPNCKAVDIGPGLNLLQEDNPDLIGSEIARWLSTLEISG

SEQ ID NO: 129 - protein, 68 aa, Synthetic construct
MAEIGTGFPFDPHYVEVLGERMHYVDVGPRDGTPVLFLHGNPTSSYVWRNIIPHVAPTHRCIAPDLIG

SEQ ID NO: 130 - protein, 228 aa, Synthetic construct
GKSDKPDLGYFFDDHVRFMDAFIEALGLEEVVLVIHDWGSALGFHWAKRNPERVKGIAFMEFIRPIPTWDEWPEFARETFQAFRTTDVGRKLIIDQNVFIEGTLPMGVVRPLTEVEMDHYREPFLNPVDREPLWRFPNELPIAGEPANIVALVEEYMDWLHQSPVPKLLFWGTPGVLIPPAEAARLAKSLPNCKAVDIGPGLNLLQEDNPDLIGSEIARWLSTLEISG

SEQ ID NO: 131 - protein, 69 aa, Synthetic construct
MAEIGTGFPFDPHYVEVLGERMHYVDVGPRDGTPVLFLHGNPTSSYVWRNIIPHVAPTHRCIAPDLIGM

SEQ ID NO: 132 - protein, 227 aa, Synthetic construct
KSDKPDLGYFFDDHVRFMDAFIEALGLEEVVLVIHDWGSALGFHWAKRNPERVKGIAFMEFIRPIPTWDEWPEFARETFQAFRTTDVGRKLIIDQNVFIEGTLPMGVVRPLTEVEMDHYREPFLNPVDREPLWRFPNELPIAGEPANIVALVEEYMDWLHQSPVPKLLFWGTPGVLIPPAEAARLAKSLPNCKAVDIGPGLNLLQEDNPDLIGSEIARWLSTLEISG

SEQ ID NO: 133 - protein, 70 aa, Synthetic construct
MAEIGTGFPFDPHYVEVLGERMHYVDVGPRDGTPVLFLHGNPTSSYVWRNIIPHVAPTHRCIAPDLIGMG

SEQ ID NO: 134 - protein, 226 aa, Synthetic construct
SDKPDLGYFFDDHVRFMDAFIEALGLEEVVLVIHDWGSALGFHWAKRNPERVKGIAFMEFIRPIPTWDEWPEFARETFQAFRTTDVGRKLIIDQNVFIEGTLPMGVVRPLTEVEMDHYREPFLNPVDREPLWRFPNELPIAGEPANIVALVEEYMDWLHQSPVPKLLFWGTPGVLIPPAEAARLAKSLPNCKAVDIGPGLNLLQEDNPDLIGSEIARWLSTLEISG

SEQ ID NO: 135 - protein, 71 aa, Synthetic construct
MAEIGTGFPFDPHYVEVLGERMHYVDVGPRDGTPVLFLHGNPTSSYVWRNIIPHVAPTHRCIAPDLIGMGK

SEQ ID NO: 136 - protein, 225 aa, Synthetic construct
DKPDLGYFFDDHVRFMDAFIEALGLEEVVLVIHDWGSALGFHWAKRNPERVKGIAFMEFIRPIPTWDEWPEFARETFQAFRTTDVGRKLIIDQNVFIEGTLPMGVVRPLTEVEMDHYREPFLNPVDREPLWRFPNELPIAGEPANIVALVEEYMDWLHQSPVPKLLFWGTPGVLIPPAEAARLAKSLPNCKAVDIGPGLNLLQEDNPDLIGSEIARWLSTLEISG

SEQ ID NO: 137 - protein, 72 aa, Synthetic construct
MAEIGTGFPFDPHYVEVLGERMHYVDVGPRDGTPVLFLHGNPTSSYVWRNIIPHVAPTHRCIAPDLIGMGKS

SEQ ID NO: 138 - protein, 224 aa, Synthetic construct
KPDLGYFFDDHVRFMDAFIEALGLEEVVLVIHDWGSALGFHWAKRNPERVKGIAFMEFIRPIPTWDEWPEFARETFQAFRTTDVGRKLIIDQNVFIEGTLPMGVVRPLTEVEMDHYREPFLNPVDREPLWRFPNELPIAGEPANIVALVEEYMDWLHQSPVPKLLFWGTPGVLIPPAEAARLAKSLPNCKAVDIGPGLNLLQEDNPDLIGSEIARWLSTLEISG

SEQ ID NO: 139 - protein, 73 aa, Synthetic construct
MAEIGTGFPFDPHYVEVLGERMHYVDVGPRDGTPVLFLHGNPTSSYVWRNIIPHVAPTHRCIAPDLIGMGKSD

SEQ ID NO: 140 - protein, 223 aa, Synthetic construct
PDLGYFFDDHVRFMDAFIEALGLEEVVLVIHDWGSALGFHWAKRNPERVKGIAFMEFIRPIPTWDEWPEFARETFQAFRTTDVGRKLIIDQNVFIEGTLPMGVVRPLTEVEMDHYREPFLNPVDREPLWRFPNELPIAGEPANIVALVEEYMDWLHQSPVPKLLFWGTPGVLIPPAEAARLAKSLPNCKAVDIGPGLNLLQEDNPDLIGSEIARWLSTLEISG

SEQ ID NO: 141 - protein, 74 aa, Synthetic construct
MAEIGTGFPFDPHYVEVLGERMHYVDVGPRDGTPVLFLHGNPTSSYVWRNIIPHVAPTHRCIAPDLIGMGKSDK

SEQ ID NO: 142 - protein, 222 aa, Synthetic construct
DLGYFFDDHVRFMDAFIEALGLEEVVLVIHDWGSALGFHWAKRNPERVKGIAFMEFIRPIPTWDEWPEFARETFQAFRTTDVGRKLIIDQNVFIEGTLPMGVVRPLTEVEMDHYREPFLNPVDREPLWRFPNELPIAGEPANIVALVEEYMDWLHQSPVPKLLFWGTPGVLIPPAEAARLAKSLPNCKAVDIGPGLNLLQEDNPDLIGSEIARWLSTLEISG

SEQ ID NO: 143 - protein, 75 aa, Synthetic construct
MAEIGTGFPFDPHYVEVLGERMHYVDVGPRDGTPVLFLHGNPTSSYVWRNIIPHVAPTHRCIAPDLIGMGKSDKP

SEQ ID NO: 144 - protein, 221 aa, Synthetic construct
LGYFFDDHVRFMDAFIEALGLEEVVLVIHDWGSALGFHWAKRNPERVKGIAFMEFIRPIPTWDEWPEFARETFQAFRTTDVGRKLIIDQNVFIEGTLPMGVVRPLTEVEMDHYREPFLNPVDREPLWRFPNELPIAGEPANIVALVEEYMDWLHQSPVPKLLFWGTPGVLIPPAEAARLAKSLPNCKAVDIGPGLNLLQEDNPDLIGSEIARWLSTLEISG

SEQ ID NO: 145 - protein, 76 aa, Synthetic construct
MAEIGTGFPFDPHYVEVLGERMHYVDVGPRDGTPVLFLHGNPTSSYVWRNIIPHVAPTHRCIAPDLIGMGKSDKPD

SEQ ID NO: 146 - protein, 220 aa, Synthetic construct
GYFFDDHVRFMDAFIEALGLEEVVLVIHDWGSALGFHWAKRNPERVKGIAFMEFIRPIPTWDEWPEFARETFQAFRTTDVGRKLIIDQNVFIEGTLPMGVVRPLTEVEMDHYREPFLNPVDREPLWRFPNELPIAGEPANIVALVEEYMDWLHQSPVPKLLFWGTPGVLIPPAEAARLAKSLPNCKAVDIGPGLNLLQEDNPDLIGSEIARWLSTLEISG

SEQ ID NO: 147 - protein, 77 aa, Synthetic construct
MAEIGTGFPFDPHYVEVLGERMHYVDVGPRDGTPVLFLHGNPTSSYVWRNIIPHVAPTHRCIAPDLIGMGKSDKPDL

SEQ ID NO: 148 - protein, 219 aa, Synthetic construct
YFFDDHVRFMDAFIEALGLEEVVLVIHDWGSALGFHWAKRNPERVKGIAFMEFIRPIPTWDEWPEFARETFQAFRTTDVGRKLIIDQNVFIEGTLPMGVVRPLTEVEMDHYREPFLNPVDREPLWRFPNELPIAGEPANIVALVEEYMDWLHQSPVPKLLFWGTPGVLIPPAEAARLAKSLPNCKAVDIGPGLNLLQEDNPDLIGSEIARWLSTLEISG

SEQ ID NO: 149 - protein, 78 aa, Synthetic construct
MAEIGTGFPFDPHYVEVLGERMHYVDVGPRDGTPVLFLHGNPTSSYVWRNIIPHVAPTHRCIAPDLIGMGKSDKPDLG

SEQ ID NO: 150 - protein, 218 aa, Synthetic construct
FFDDHVRFMDAFIEALGLEEVVLVIHDWGSALGFHWAKRNPERVKGIAFMEFIRPIPTWDEWPEFARETFQAFRTTDVGRKLIIDQNVFIEGTLPMGVVRPLTEVEMDHYREPFLNPVDREPLWRFPNELPIAGEPANIVALVEEYMDWLHQSPVPKLLFWGTPGVLIPPAEAARLAKSLPNCKAVDIGPGLNLLQEDNPDLIGSEIARWLSTLEISG

SEQ ID NO: 151 - protein, 79 aa, Synthetic construct
MAEIGTGFPFDPHYVEVLGERMHYVDVGPRDGTPVLFLHGNPTSSYVWRNIIPHVAPTHRCIAPDLIGMGKSDKPDLGY

SEQ ID NO: 152 - protein, 217 aa, Synthetic construct
FDDHVRFMDAFIEALGLEEVVLVIHDWGSALGFHWAKRNPERVKGIAFMEFIRPIPTWDEWPEFARETFQAFRTTDVGRKLIIDQNVFIEGTLPMGVVRPLTEVEMDHYREPFLNPVDREPLWRFPNELPIAGEPANIVALVEEYMDWLHQSPVPKLLFWGTPGVLIPPAEAARLAKSLPNCKAVDIGPGLNLLQEDNPDLIGSEIARWLSTLEISG

SEQ ID NO: 153 - protein, 80 aa, Synthetic construct
MAEIGTGFPFDPHYVEVLGERMHYVDVGPRDGTPVLFLHGNPTSSYVWRNIIPHVAPTHRCIAPDLIGMGKSDKPDLGYF

SEQ ID NO: 154 - protein, 216 aa, Synthetic construct
DDHVRFMDAFIEALGLEEVVLVIHDWGSALGFHWAKRNPERVKGIAFMEFIRPIPTWDEWPEFARETFQAFRTTDVGRKLIIDQNVFIEGTLPMGVVRPLTEVEMDHYREPFLNPVDREPLWRFPNELPIAGEPANIVALVEEYMDWLHQSPVPKLLFWGTPGVLIPPAEAARLAKSLPNCKAVDIGPGLNLLQEDNPDLIGSEIARWLSTLEISG

SEQ ID NO: 155 - protein, 81 aa, Synthetic construct
MAEIGTGFPFDPHYVEVLGERMHYVDVGPRDGTPVLFLHGNPTSSYVWRNIIPHVAPTHRCIAPDLIGMGKSDKPDLGYFF

SEQ ID NO: 156 - protein, 215 aa, Synthetic construct
DHVRFMDAFIEALGLEEVVLVIHDWGSALGFHWAKRNPERVKGIAFMEFIRPIPTWDEWPEFARETFQAFRTTDVGRKLIIDQNVFIEGTLPMGVVRPLTEVEMDHYREPFLNPVDREPLWRFPNELPIAGEPANIVALVEEYMDWLHQSPVPKLLFWGTPGVLIPPAEAARLAKSLPNCKAVDIGPGLNLLQEDNPDLIGSEIARWLSTLEISG

SEQ ID NO: 157 - protein, 82 aa, Synthetic construct
MAEIGTGFPFDPHYVEVLGERMHYVDVGPRDGTPVLFLHGNPTSSYVWRNIIPHVAPTHRCIAPDLIGMGKSDKPDLGYFFD

SEQ ID NO: 158 - protein, 214 aa, Synthetic construct
HVRFMDAFIEALGLEEVVLVIHDWGSALGFHWAKRNPERVKGIAFMEFIRPIPTWDEWPEFARETFQAFRTTDVGRKLIIDQNVFIEGTLPMGVVRPLTEVEMDHYREPFLNPVDREPLWRFPNELPIAGEPANIVALVEEYMDWLHQSPVPKLLFWGTPGVLIPPAEAARLAKSLPNCKAVDIGPGLNLLQEDNPDLIGSEIARWLSTLEISG

SEQ ID NO: 159 - protein, 83 aa, Synthetic construct
MAEIGTGFPFDPHYVEVLGERMHYVDVGPRDGTPVLFLHGNPTSSYVWRNIIPHVAPTHRCIAPDLIGMGKSDKPDLGYFFDD

SEQ ID NO: 160 - protein, 213 aa, Synthetic construct
VRFMDAFIEALGLEEVVLVIHDWGSALGFHWAKRNPERVKGIAFMEFIRPIPTWDEWPEFARETFQAFRTTDVGRKLIIDQNVFIEGTLPMGVVRPLTEVEMDHYREPFLNPVDREPLWRFPNELPIAGEPANIVALVEEYMDWLHQSPVPKLLFWGTPGVLIPPAEAARLAKSLPNCKAVDIGPGLNLLQEDNPDLIGSEIARWLSTLEISG

SEQ ID NO: 161 - protein, 84 aa, Synthetic construct
MAEIGTGFPFDPHYVEVLGERMHYVDVGPRDGTPVLFLHGNPTSSYVWRNIIPHVAPTHRCIAPDLIGMGKSDKPDLGYFFDDH

SEQ ID NO: 162 - protein, 212 aa, Synthetic construct
RFMDAFIEALGLEEVVLVIHDWGSALGFHWAKRNPERVKGIAFMEFIRPIPTWDEWPEFARETFQAFRTTDVGRKLIIDQNVFIEGTLPMGVVRPLTEVEMDHYREPFLNPVDREPLWRFPNELPIAGEPANIVALVEEYMDWLHQSPVPKLLFWGTPGVLIPPAEAARLAKSLPNCKAVDIGPGLNLLQEDNPDLIGSEIARWLSTLEISG

SEQ ID NO: 163 - protein, 85 aa, Synthetic construct
MAEIGTGFPFDPHYVEVLGERMHYVDVGPRDGTPVLFLHGNPTSSYVWRNIIPHVAPTHRCIAPDLIGMGKSDKPDLGYFFDDHV

SEQ ID NO: 164 - protein, 211 aa, Synthetic construct
FMDAFIEALGLEEVVLVIHDWGSALGFHWAKRNPERVKGIAFMEFIRPIPTWDEWPEFARETFQAFRTTDVGRKLIIDQNVFIEGTLPMGVVRPLTEVEMDHYREPFLNPVDREPLWRFPNELPIAGEPANIVALVEEYMDWLHQSPVPKLLFWGTPGVLIPPAEAARLAKSLPNCKAVDIGPGLNLLQEDNPDLIGSEIARWLSTLEISG

SEQ ID NO: 165 - protein, 86 aa, Synthetic construct
MAEIGTGFPFDPHYVEVLGERMHYVDVGPRDGTPVLFLHGNPTSSYVWRNIIPHVAPTHRCIAPDLIGMGKSDKPDLGYFFDDHVR

SEQ ID NO: 166 - protein, 210 aa, Synthetic construct
MDAFIEALGLEEVVLVIHDWGSALGFHWAKRNPERVKGIAFMEFIRPIPTWDEWPEFARETFQAFRTTDVGRKLIIDQNVFIEGTLPMGVVRPLTEVEMDHYREPFLNPVDREPLWRFPNELPIAGEPANIVALVEEYMDWLHQSPVPKLLFWGTPGVLIPPAEAARLAKSLPNCKAVDIGPGLNLLQEDNPDLIGSEIARWLSTLEISG

SEQ ID NO: 167 - protein, 87 aa, Synthetic construct
MAEIGTGFPFDPHYVEVLGERMHYVDVGPRDGTPVLFLHGNPTSSYVWRNIIPHVAPTHRCIAPDLIGMGKSDKPDLGYFFDDHVRF

SEQ ID NO: 168 - protein, 209 aa, Synthetic construct
DAFIEALGLEEVVLVIHDWGSALGFHWAKRNPERVKGIAFMEFIRPIPTWDEWPEFARETFQAFRTTDVGRKLIIDQNVFIEGTLPMGVVRPLTEVEMDHYREPFLNPVDREPLWRFPNELPIAGEPANIVALVEEYMDWLHQSPVPKLLFWGTPGVLIPPAEAARLAKSLPNCKAVDIGPGLNLLQEDNPDLIGSEIARWLSTLEISG

SEQ ID NO: 169 - protein, 88 aa, Synthetic construct
MAEIGTGFPFDPHYVEVLGERMHYVDVGPRDGTPVLFLHGNPTSSYVWRNIIPHVAPTHRCIAPDLIGMGKSDKPDLGYFFDDHVRFM

SEQ ID NO: 170 - protein, 208 aa, Synthetic construct
AFIEALGLEEVVLVIHDWGSALGFHWAKRNPERVKGIAFMEFIRPIPTWDEWPEFARETFQAFRTTDVGRKLIIDQNVFIEGTLPMGVVRPLTEVEMDHYREPFLNPVDREPLWRFPNELPIAGEPANIVALVEEYMDWLHQSPVPKLLFWGTPGVLIPPAEAARLAKSLPNCKAVDIGPGLNLLQEDNPDLIGSEIARWLSTLEISG

SEQ ID NO: 171 - protein, 89 aa, Synthetic construct
MAEIGTGFPFDPHYVEVLGERMHYVDVGPRDGTPVLFLHGNPTSSYVWRNIIPHVAPTHRCIAPDLIGMGKSDKPDLGYFFDDHVRFMD

SEQ ID NO: 172 - protein, 207 aa, Synthetic construct
FIEALGLEEVVLVIHDWGSALGFHWAKRNPERVKGIAFMEFIRPIPTWDEWPEFARETFQAFRTTDVGRKLIIDQNVFIEGTLPMGVVRPLTEVEMDHYREPFLNPVDREPLWRFPNELPIAGEPANIVALVEEYMDWLHQSPVPKLLFWGTPGVLIPPAEAARLAKSLPNCKAVDIGPGLNLLQEDNPDLIGSEIARWLSTLEISG

SEQ ID NO: 173 - protein, 90 aa, Synthetic construct
MAEIGTGFPFDPHYVEVLGERMHYVDVGPRDGTPVLFLHGNPTSSYVWRNIIPHVAPTHRCIAPDLIGMGKSDKPDLGYFFDDHVRFMDA

SEQ ID NO: 174 - protein, 206 aa, Synthetic construct
IEALGLEEVVLVIHDWGSALGFHWAKRNPERVKGIAFMEFIRPIPTWDEWPEFARETFQAFRTTDVGRKLIIDQNVFIEGTLPMGVVRPLTEVEMDHYREPFLNPVDREPLWRFPNELPIAGEPANIVALVEEYMDWLHQSPVPKLLFWGTPGVLIPPAEAARLAKSLPNCKAVDIGPGLNLLQEDNPDLIGSEIARWLSTLEISG

SEQ ID NO: 175 - protein, 91 aa, Synthetic construct
MAEIGTGFPFDPHYVEVLGERMHYVDVGPRDGTPVLFLHGNPTSSYVWRNIIPHVAPTHRCIAPDLIGMGKSDKPDLGYFFDDHVRFMDAF

SEQ ID NO: 176 - protein, 205 aa, Synthetic construct
EALGLEEVVLVIHDWGSALGFHWAKRNPERVKGIAFMEFIRPIPTWDEWPEFARETFQAFRTTDVGRKLIIDQNVFIEGTLPMGVVRPLTEVEMDHYREPFLNPVDREPLWRFPNELPIAGEPANIVALVEEYMDWLHQSPVPKLLFWGTPGVLIPPAEAARLAKSLPNCKAVDIGPGLNLLQEDNPDLIGSEIARWLSTLEISG

SEQ ID NO: 177 - protein, 92 aa, Synthetic construct
MAEIGTGFPFDPHYVEVLGERMHYVDVGPRDGTPVLFLHGNPTSSYVWRNIIPHVAPTHRCIAPDLIGMGKSDKPDLGYFFDDHVRFMDAFI

SEQ ID NO: 178 - protein, 204 aa, Synthetic construct
ALGLEEVVLVIHDWGSALGFHWAKRNPERVKGIAFMEFIRPIPTWDEWPEFARETFQAFRTTDVGRKLIIDQNVFIEGTLPMGVVRPLTEVEMDHYREPFLNPVDREPLWRFPNELPIAGEPANIVALVEEYMDWLHQSPVPKLLFWGTPGVLIPPAEAARLAKSLPNCKAVDIGPGLNLLQEDNPDLIGSEIARWLSTLEISG

SEQ ID NO: 179 - protein, 93 aa, Synthetic construct
MAEIGTGFPFDPHYVEVLGERMHYVDVGPRDGTPVLFLHGNPTSSYVWRNIIPHVAPTHRCIAPDLIGMGKSDKPDLGYFFDDHVRFMDAFIE

SEQ ID NO: 180 - protein, 203 aa, Synthetic construct
LGLEEVVLVIHDWGSALGFHWAKRNPERVKGIAFMEFIRPIPTWDEWPEFARETFQAFRTTDVGRKLIIDQNVFIEGTLPMGVVRPLTEVEMDHYREPFLNPVDREPLWRFPNELPIAGEPANIVALVEEYMDWLHQSPVPKLLFWGTPGVLIPPAEAARLAKSLPNCKAVDIGPGLNLLQEDNPDLIGSEIARWLSTLEISG

SEQ ID NO: 181 - protein, 94 aa, Synthetic construct
MAEIGTGFPFDPHYVEVLGERMHYVDVGPRDGTPVLFLHGNPTSSYVWRNIIPHVAPTHRCIAPDLIGMGKSDKPDLGYFFDDHVRFMDAFIEA

SEQ ID NO: 182 - protein, 202 aa, Synthetic construct
GLEEVVLVIHDWGSALGFHWAKRNPERVKGIAFMEFIRPIPTWDEWPEFARETFQAFRTTDVGRKLIIDQNVFIEGTLPMGVVRPLTEVEMDHYREPFLNPVDREPLWRFPNELPIAGEPANIVALVEEYMDWLHQSPVPKLLFWGTPGVLIPPAEAARLAKSLPNCKAVDIGPGLNLLQEDNPDLIGSEIARWLSTLEISG

SEQ ID NO: 183 - protein, 95 aa, Synthetic construct
MAEIGTGFPFDPHYVEVLGERMHYVDVGPRDGTPVLFLHGNPTSSYVWRNIIPHVAPTHRCIAPDLIGMGKSDKPDLGYFFDDHVRFMDAFIEAL

SEQ ID NO: 184 - protein, 201 aa, Synthetic construct
LEEVVLVIHDWGSALGFHWAKRNPERVKGIAFMEFIRPIPTWDEWPEFARETFQAFRTTDVGRKLIIDQNVFIEGTLPMGVVRPLTEVEMDHYREPFLNPVDREPLWRFPNELPIAGEPANIVALVEEYMDWLHQSPVPKLLFWGTPGVLIPPAEAARLAKSLPNCKAVDIGPGLNLLQEDNPDLIGSEIARWLSTLEISG

SEQ ID NO: 185 - protein, 96 aa, Synthetic construct
MAEIGTGFPFDPHYVEVLGERMHYVDVGPRDGTPVLFLHGNPTSSYVWRNIIPHVAPTHRCIAPDLIGMGKSDKPDLGYFFDDHVRFMDAFIEALG

SEQ ID NO: 186 - protein, 200 aa, Synthetic construct
EEVVLVIHDWGSALGFHWAKRNPERVKGIAFMEFIRPIPTWDEWPEFARETFQAFRTTDVGRKLIIDQNVFIEGTLPMGVVRPLTEVEMDHYREPFLNPVDREPLWRFPNELPIAGEPANIVALVEEYMDWLHQSPVPKLLFWGTPGVLIPPAEAARLAKSLPNCKAVDIGPGLNLLQEDNPDLIGSEIARWLSTLEISG

SEQ ID NO: 187 - protein, 97 aa, Synthetic construct
MAEIGTGFPFDPHYVEVLGERMHYVDVGPRDGTPVLFLHGNPTSSYVWRNIIPHVAPTHRCIAPDLIGMGKSDKPDLGYFFDDHVRFMDAFIEALGL

SEQ ID NO: 188 - protein, 199 aa, Synthetic construct
EVVLVIHDWGSALGFHWAKRNPERVKGIAFMEFIRPIPTWDEWPEFARETFQAFRTTDVGRKLIIDQNVFIEGTLPMGVVRPLTEVEMDHYREPFLNPVDREPLWRFPNELPIAGEPANIVALVEEYMDWLHQSPVPKLLFWGTPGVLIPPAEAARLAKSLPNCKAVDIGPGLNLLQEDNPDLIGSEIARWLSTLEISG

SEQ ID NO: 189 - protein, 98 aa, Synthetic construct
MAEIGTGFPFDPHYVEVLGERMHYVDVGPRDGTPVLFLHGNPTSSYVWRNIIPHVAPTHRCIAPDLIGMGKSDKPDLGYFFDDHVRFMDAFIEALGLE

SEQ ID NO: 190 - protein, 198 aa, Synthetic construct
VVLVIHDWGSALGFHWAKRNPERVKGIAFMEFIRPIPTWDEWPEFARETFQAFRTTDVGRKLIIDQNVFIEGTLPMGVVRPLTEVEMDHYREPFLNPVDREPLWRFPNELPIAGEPANIVALVEEYMDWLHQSPVPKLLFWGTPGVLIPPAEAARLAKSLPNCKAVDIGPGLNLLQEDNPDLIGSEIARWLSTLEISG

SEQ ID NO: 191 - protein, 99 aa, Synthetic construct
MAEIGTGFPFDPHYVEVLGERMHYVDVGPRDGTPVLFLHGNPTSSYVWRNIIPHVAPTHRCIAPDLIGMGKSDKPDLGYFFDDHVRFMDAFIEALGLEE

SEQ ID NO: 192 - protein, 197 aa, Synthetic construct
VLVIHDWGSALGFHWAKRNPERVKGIAFMEFIRPIPTWDEWPEFARETFQAFRTTDVGRKLIIDQNVFIEGTLPMGVVRPLTEVEMDHYREPFLNPVDREPLWRFPNELPIAGEPANIVALVEEYMDWLHQSPVPKLLFWGTPGVLIPPAEAARLAKSLPNCKAVDIGPGLNLLQEDNPDLIGSEIARWLSTLEISG

SEQ ID NO: 193 - protein, 100 aa, Synthetic construct
MAEIGTGFPFDPHYVEVLGERMHYVDVGPRDGTPVLFLHGNPTSSYVWRNIIPHVAPTHRCIAPDLIGMGKSDKPDLGYFFDDHVRFMDAFIEALGLEEV

SEQ ID NO: 194 - protein, 196 aa, Synthetic construct
LVIHDWGSALGFHWAKRNPERVKGIAFMEFIRPIPTWDEWPEFARETFQAFRTTDVGRKLIIDQNVFIEGTLPMGVVRPLTEVEMDHYREPFLNPVDREPLWRFPNELPIAGEPANIVALVEEYMDWLHQSPVPKLLFWGTPGVLIPPAEAARLAKSLPNCKAVDIGPGLNLLQEDNPDLIGSEIARWLSTLEISG

SEQ ID NO: 195 - protein, 101 aa, Synthetic construct
MAEIGTGFPFDPHYVEVLGERMHYVDVGPRDGTPVLFLHGNPTSSYVWRNIIPHVAPTHRCIAPDLIGMGKSDKPDLGYFFDDHVRFMDAFIEALGLEEVV

SEQ ID NO: 196 - protein, 195 aa, Synthetic construct
VIHDWGSALGFHWAKRNPERVKGIAFMEFIRPIPTWDEWPEFARETFQAFRTTDVGRKLIIDQNVFIEGTLPMGVVRPLTEVEMDHYREPFLNPVDREPLWRFPNELPIAGEPANIVALVEEYMDWLHQSPVPKLLFWGTPGVLIPPAEAARLAKSLPNCKAVDIGPGLNLLQEDNPDLIGSEIARWLSTLEISG

SEQ ID NO: 197 - protein, 102 aa, Synthetic construct
MAEIGTGFPFDPHYVEVLGERMHYVDVGPRDGTPVLFLHGNPTSSYVWRNIIPHVAPTHRCIAPDLIGMGKSDKPDLGYFFDDHVRFMDAFIEALGLEEVVL

SEQ ID NO: 198 - protein, 194 aa, Synthetic construct
IHDWGSALGFHWAKRNPERVKGIAFMEFIRPIPTWDEWPEFARETFQAFRTTDVGRKLIIDQNVFIEGTLPMGVVRPLTEVEMDHYREPFLNPVDREPLWRFPNELPIAGEPANIVALVEEYMDWLHQSPVPKLLFWGTPGVLIPPAEAARLAKSLPNCKAVDIGPGLNLLQEDNPDLIGSEIARWLSTLEISG

SEQ ID NO: 199 - protein, 103 aa, Synthetic construct
MAEIGTGFPFDPHYVEVLGERMHYVDVGPRDGTPVLFLHGNPTSSYVWRNIIPHVAPTHRCIAPDLIGMGKSDKPDLGYFFDDHVRFMDAFIEALGLEEVVLV

SEQ ID NO: 200 - protein, 193 aa, Synthetic construct
HDWGSALGFHWAKRNPERVKGIAFMEFIRPIPTWDEWPEFARETFQAFRTTDVGRKLIIDQNVFIEGTLPMGVVRPLTEVEMDHYREPFLNPVDREPLWRFPNELPIAGEPANIVALVEEYMDWLHQSPVPKLLFWGTPGVLIPPAEAARLAKSLPNCKAVDIGPGLNLLQEDNPDLIGSEIARWLSTLEISG

SEQ ID NO: 201 - protein, 104 aa, Synthetic construct
MAEIGTGFPFDPHYVEVLGERMHYVDVGPRDGTPVLFLHGNPTSSYVWRNIIPHVAPTHRCIAPDLIGMGKSDKPDLGYFFDDHVRFMDAFIEALGLEEVVLVI

SEQ ID NO: 202 - protein, 192 aa, Synthetic construct
DWGSALGFHWAKRNPERVKGIAFMEFIRPIPTWDEWPEFARETFQAFRTTDVGRKLIIDQNVFIEGTLPMGVVRPLTEVEMDHYREPFLNPVDREPLWRFPNELPIAGEPANIVALVEEYMDWLHQSPVPKLLFWGTPGVLIPPAEAARLAKSLPNCKAVDIGPGLNLLQEDNPDLIGSEIARWLSTLEISG

SEQ ID NO: 203 - protein, 105 aa, Synthetic construct
MAEIGTGFPFDPHYVEVLGERMHYVDVGPRDGTPVLFLHGNPTSSYVWRNIIPHVAPTHRCIAPDLIGMGKSDKPDLGYFFDDHVRFMDAFIEALGLEEVVLVIH

SEQ ID NO: 204 - protein, 191 aa, Synthetic construct
WGSALGFHWAKRNPERVKGIAFMEFIRPIPTWDEWPEFARETFQAFRTTDVGRKLIIDQNVFIEGTLPMGVVRPLTEVEMDHYREPFLNPVDREPLWRFPNELPIAGEPANIVALVEEYMDWLHQSPVPKLLFWGTPGVLIPPAEAARLAKSLPNCKAVDIGPGLNLLQEDNPDLIGSEIARWLSTLEISG

SEQ ID NO: 205 - protein, 106 aa, Synthetic construct
MAEIGTGFPFDPHYVEVLGERMHYVDVGPRDGTPVLFLHGNPTSSYVWRNIIPHVAPTHRCIAPDLIGMGKSDKPDLGYFFDDHVRFMDAFIEALGLEEVVLVIHD

SEQ ID NO: 206 - protein, 190 aa, Synthetic construct
GSALGFHWAKRNPERVKGIAFMEFIRPIPTWDEWPEFARETFQAFRTTDVGRKLIIDQNVFIEGTLPMGVVRPLTEVEMDHYREPFLNPVDREPLWRFPNELPIAGEPANIVALVEEYMDWLHQSPVPKLLFWGTPGVLIPPAEAARLAKSLPNCKAVDIGPGLNLLQEDNPDLIGSEIARWLSTLEISG

SEQ ID NO: 207 - protein, 107 aa, Synthetic construct
MAEIGTGFPFDPHYVEVLGERMHYVDVGPRDGTPVLFLHGNPTSSYVWRNIIPHVAPTHRCIAPDLIGMGKSDKPDLGYFFDDHVRFMDAFIEALGLEEVVLVIHDW

SEQ ID NO: 208 - protein, 189 aa, Synthetic construct
SALGFHWAKRNPERVKGIAFMEFIRPIPTWDEWPEFARETFQAFRTTDVGRKLIIDQNVFIEGTLPMGVVRPLTEVEMDHYREPFLNPVDREPLWRFPNELPIAGEPANIVALVEEYMDWLHQSPVPKLLFWGTPGVLIPPAEAARLAKSLPNCKAVDIGPGLNLLQEDNPDLIGSEIARWLSTLEISG

SEQ ID NO: 209 - protein, 108 aa, Synthetic construct
MAEIGTGFPFDPHYVEVLGERMHYVDVGPRDGTPVLFLHGNPTSSYVWRNIIPHVAPTHRCIAPDLIGMGKSDKPDLGYFFDDHVRFMDAFIEALGLEEVVLVIHDWG

SEQ ID NO: 210 - protein, 188 aa, Synthetic construct
ALGFHWAKRNPERVKGIAFMEFIRPIPTWDEWPEFARETFQAFRTTDVGRKLIIDQNVFIEGTLPMGVVRPLTEVEMDHYREPFLNPVDREPLWRFPNELPIAGEPANIVALVEEYMDWLHQSPVPKLLFWGTPGVLIPPAEAARLAKSLPNCKAVDIGPGLNLLQEDNPDLIGSEIARWLSTLEISG

SEQ ID NO: 211 - protein, 109 aa, Synthetic construct
MAEIGTGFPFDPHYVEVLGERMHYVDVGPRDGTPVLFLHGNPTSSYVWRNIIPHVAPTHRCIAPDLIGMGKSDKPDLGYFFDDHVRFMDAFIEALGLEEVVLVIHDWGS

SEQ ID NO: 212 - protein, 187 aa, Synthetic construct
LGFHWAKRNPERVKGIAFMEFIRPIPTWDEWPEFARETFQAFRTTDVGRKLIIDQNVFIEGTLPMGVVRPLTEVEMDHYREPFLNPVDREPLWRFPNELPIAGEPANIVALVEEYMDWLHQSPVPKLLFWGTPGVLIPPAEAARLAKSLPNCKAVDIGPGLNLLQEDNPDLIGSEIARWLSTLEISG

SEQ ID NO: 213 - protein, 110 aa, Synthetic construct
MAEIGTGFPFDPHYVEVLGERMHYVDVGPRDGTPVLFLHGNPTSSYVWRNIIPHVAPTHRCIAPDLIGMGKSDKPDLGYFFDDHVRFMDAFIEALGLEEVVLVIHDWGSA

SEQ ID NO: 214 - protein, 186 aa, Synthetic construct
GFHWAKRNPERVKGIAFMEFIRPIPTWDEWPEFARETFQAFRTTDVGRKLIIDQNVFIEGTLPMGVVRPLTEVEMDHYREPFLNPVDREPLWRFPNELPIAGEPANIVALVEEYMDWLHQSPVPKLLFWGTPGVLIPPAEAARLAKSLPNCKAVDIGPGLNLLQEDNPDLIGSEIARWLSTLEISG

SEQ ID NO: 215 - protein, 111 aa, Synthetic construct
MAEIGTGFPFDPHYVEVLGERMHYVDVGPRDGTPVLFLHGNPTSSYVWRNIIPHVAPTHRCIAPDLIGMGKSDKPDLGYFFDDHVRFMDAFIEALGLEEVVLVIHDWGSAL

SEQ ID NO: 216 - protein, 185 aa, Synthetic construct
FHWAKRNPERVKGIAFMEFIRPIPTWDEWPEFARETFQAFRTTDVGRKLIIDQNVFIEGTLPMGVVRPLTEVEMDHYREPFLNPVDREPLWRFPNELPIAGEPANIVALVEEYMDWLHQSPVPKLLFWGTPGVLIPPAEAARLAKSLPNCKAVDIGPGLNLLQEDNPDLIGSEIARWLSTLEISG

SEQ ID NO: 217 - protein, 112 aa, Synthetic construct
MAEIGTGFPFDPHYVEVLGERMHYVDVGPRDGTPVLFLHGNPTSSYVWRNIIPHVAPTHRCIAPDLIGMGKSDKPDLGYFFDDHVRFMDAFIEALGLEEVVLVIHDWGSALG

SEQ ID NO: 218 - protein, 184 aa, Synthetic construct
HWAKRNPERVKGIAFMEFIRPIPTWDEWPEFARETFQAFRTTDVGRKLIIDQNVFIEGTLPMGVVRPLTEVEMDHYREPFLNPVDREPLWRFPNELPIAGEPANIVALVEEYMDWLHQSPVPKLLFWGTPGVLIPPAEAARLAKSLPNCKAVDIGPGLNLLQEDNPDLIGSEIARWLSTLEISG

SEQ ID NO: 219 - protein, 113 aa, Synthetic construct
MAEIGTGFPFDPHYVEVLGERMHYVDVGPRDGTPVLFLHGNPTSSYVWRNIIPHVAPTHRCIAPDLIGMGKSDKPDLGYFFDDHVRFMDAFIEALGLEEVVLVIHDWGSALGF

SEQ ID NO: 220 - protein, 183 aa, Synthetic construct
WAKRNPERVKGIAFMEFIRPIPTWDEWPEFARETFQAFRTTDVGRKLIIDQNVFIEGTLPMGVVRPLTEVEMDHYREPFLNPVDREPLWRFPNELPIAGEPANIVALVEEYMDWLHQSPVPKLLFWGTPGVLIPPAEAARLAKSLPNCKAVDIGPGLNLLQEDNPDLIGSEIARWLSTLEISG

SEQ ID NO: 221 - protein, 114 aa, Synthetic construct
MAEIGTGFPFDPHYVEVLGERMHYVDVGPRDGTPVLFLHGNPTSSYVWRNIIPHVAPTHRCIAPDLIGMGKSDKPDLGYFFDDHVRFMDAFIEALGLEEVVLVIHDWGSALGFH

SEQ ID NO: 222 - protein, 182 aa, Synthetic construct
AKRNPERVKGIAFMEFIRPIPTWDEWPEFARETFQAFRTTDVGRKLIIDQNVFIEGTLPMGVVRPLTEVEMDHYREPFLNPVDREPLWRFPNELPIAGEPANIVALVEEYMDWLHQSPVPKLLFWGTPGVLIPPAEAARLAKSLPNCKAVDIGPGLNLLQEDNPDLIGSEIARWLSTLEISG

SEQ ID NO: 223 - protein, 115 aa, Synthetic construct
MAEIGTGFPFDPHYVEVLGERMHYVDVGPRDGTPVLFLHGNPTSSYVWRNIIPHVAPTHRCIAPDLIGMGKSDKPDLGYFFDDHVRFMDAFIEALGLEEVVLVIHDWGSALGFHW

SEQ ID NO: 224 - protein, 181 aa, Synthetic construct
KRNPERVKGIAFMEFIRPIPTWDEWPEFARETFQAFRTTDVGRKLIIDQNVFIEGTLPMGVVRPLTEVEMDHYREPFLNPVDREPLWRFPNELPIAGEPANIVALVEEYMDWLHQSPVPKLLFWGTPGVLIPPAEAARLAKSLPNCKAVDIGPGLNLLQEDNPDLIGSEIARWLSTLEISG

SEQ ID NO: 225 - protein, 116 aa, Synthetic construct
MAEIGTGFPFDPHYVEVLGERMHYVDVGPRDGTPVLFLHGNPTSSYVWRNIIPHVAPTHRCIAPDLIGMGKSDKPDLGYFFDDHVRFMDAFIEALGLEEVVLVIHDWGSALGFHWA

SEQ ID NO: 226 - protein, 180 aa, Synthetic construct
RNPERVKGIAFMEFIRPIPTWDEWPEFARETFQAFRTTDVGRKLIIDQNVFIEGTLPMGVVRPLTEVEMDHYREPFLNPVDREPLWRFPNELPIAGEPANIVALVEEYMDWLHQSPVPKLLFWGTPGVLIPPAEAARLAKSLPNCKAVDIGPGLNLLQEDNPDLIGSEIARWLSTLEISG

SEQ ID NO: 227 - protein, 117 aa, Synthetic construct
MAEIGTGFPFDPHYVEVLGERMHYVDVGPRDGTPVLFLHGNPTSSYVWRNIIPHVAPTHRCIAPDLIGMGKSDKPDLGYFFDDHVRFMDAFIEALGLEEVVLVIHDWGSALGFHWAK

SEQ ID NO: 228 - protein, 179 aa, Synthetic construct
NPERVKGIAFMEFIRPIPTWDEWPEFARETFQAFRTTDVGRKLIIDQNVFIEGTLPMGVVRPLTEVEMDHYREPFLNPVDREPLWRFPNELPIAGEPANIVALVEEYMDWLHQSPVPKLLFWGTPGVLIPPAEAARLAKSLPNCKAVDIGPGLNLLQEDNPDLIGSEIARWLSTLEISG

SEQ ID NO: 229 - protein, 118 aa, Synthetic construct
MAEIGTGFPFDPHYVEVLGERMHYVDVGPRDGTPVLFLHGNPTSSYVWRNIIPHVAPTHRCIAPDLIGMGKSDKPDLGYFFDDHVRFMDAFIEALGLEEVVLVIHDWGSALGFHWAKR

SEQ ID NO: 230 - protein, 178 aa, Synthetic construct
PERVKGIAFMEFIRPIPTWDEWPEFARETFQAFRTTDVGRKLIIDQNVFIEGTLPMGVVRPLTEVEMDHYREPFLNPVDREPLWRFPNELPIAGEPANIVALVEEYMDWLHQSPVPKLLFWGTPGVLIPPAEAARLAKSLPNCKAVDIGPGLNLLQEDNPDLIGSEIARWLSTLEISG

SEQ ID NO: 231 - protein, 119 aa, Synthetic construct
MAEIGTGFPFDPHYVEVLGERMHYVDVGPRDGTPVLFLHGNPTSSYVWRNIIPHVAPTHRCIAPDLIGMGKSDKPDLGYFFDDHVRFMDAFIEALGLEEVVLVIHDWGSALGFHWAKRN

SEQ ID NO: 232 - protein, 177 aa, Synthetic construct
ERVKGIAFMEFIRPIPTWDEWPEFARETFQAFRTTDVGRKLIIDQNVFIEGTLPMGVVRPLTEVEMDHYREPFLNPVDREPLWRFPNELPIAGEPANIVALVEEYMDWLHQSPVPKLLFWGTPGVLIPPAEAARLAKSLPNCKAVDIGPGLNLLQEDNPDLIGSEIARWLSTLEISG

SEQ ID NO: 233 - protein, 120 aa, Synthetic construct
MAEIGTGFPFDPHYVEVLGERMHYVDVGPRDGTPVLFLHGNPTSSYVWRNIIPHVAPTHRCIAPDLIGMGKSDKPDLGYFFDDHVRFMDAFIEALGLEEVVLVIHDWGSALGFHWAKRNP

SEQ ID NO: 234 - protein, 176 aa, Synthetic construct
RVKGIAFMEFIRPIPTWDEWPEFARETFQAFRTTDVGRKLIIDQNVFIEGTLPMGVVRPLTEVEMDHYREPFLNPVDREPLWRFPNELPIAGEPANIVALVEEYMDWLHQSPVPKLLFWGTPGVLIPPAEAARLAKSLPNCKAVDIGPGLNLLQEDNPDLIGSEIARWLSTLEISG

SEQ ID NO: 235 - protein, 121 aa, Synthetic construct
MAEIGTGFPFDPHYVEVLGERMHYVDVGPRDGTPVLFLHGNPTSSYVWRNIIPHVAPTHRCIAPDLIGMGKSDKPDLGYFFDDHVRFMDAFIEALGLEEVVLVIHDWGSALGFHWAKRNPE

SEQ ID NO: 236 - protein, 175 aa, Synthetic construct
VKGIAFMEFIRPIPTWDEWPEFARETFQAFRTTDVGRKLIIDQNVFIEGTLPMGVVRPLTEVEMDHYREPFLNPVDREPLWRFPNELPIAGEPANIVALVEEYMDWLHQSPVPKLLFWGTPGVLIPPAEAARLAKSLPNCKAVDIGPGLNLLQEDNPDLIGSEIARWLSTLEISG

SEQ ID NO: 237 - protein, 122 aa, Synthetic construct
MAEIGTGFPFDPHYVEVLGERMHYVDVGPRDGTPVLFLHGNPTSSYVWRNIIPHVAPTHRCIAPDLIGMGKSDKPDLGYFFDDHVRFMDAFIEALGLEEVVLVIHDWGSALGFHWAKRNPER

SEQ ID NO: 238 - protein, 174 aa, Synthetic construct
KGIAFMEFIRPIPTWDEWPEFARETFQAFRTTDVGRKLIIDQNVFIEGTLPMGVVRPLTEVEMDHYREPFLNPVDREPLWRFPNELPIAGEPANIVALVEEYMDWLHQSPVPKLLFWGTPGVLIPPAEAARLAKSLPNCKAVDIGPGLNLLQEDNPDLIGSEIARWLSTLEISG

SEQ ID NO: 239 - protein, 123 aa, Synthetic construct
MAEIGTGFPFDPHYVEVLGERMHYVDVGPRDGTPVLFLHGNPTSSYVWRNIIPHVAPTHRCIAPDLIGMGKSDKPDLGYFFDDHVRFMDAFIEALGLEEVVLVIHDWGSALGFHWAKRNPERV

SEQ ID NO: 240 - protein, 173 aa, Synthetic construct
GIAFMEFIRPIPTWDEWPEFARETFQAFRTTDVGRKLIIDQNVFIEGTLPMGVVRPLTEVEMDHYREPFLNPVDREPLWRFPNELPIAGEPANIVALVEEYMDWLHQSPVPKLLFWGTPGVLIPPAEAARLAKSLPNCKAVDIGPGLNLLQEDNPDLIGSEIARWLSTLEISG

SEQ ID NO: 241 - protein, 124 aa, Synthetic construct
MAEIGTGFPFDPHYVEVLGERMHYVDVGPRDGTPVLFLHGNPTSSYVWRNIIPHVAPTHRCIAPDLIGMGKSDKPDLGYFFDDHVRFMDAFIEALGLEEVVLVIHDWGSALGFHWAKRNPERVK

SEQ ID NO: 242 - protein, 172 aa, Synthetic construct
IAFMEFIRPIPTWDEWPEFARETFQAFRTTDVGRKLIIDQNVFIEGTLPMGVVRPLTEVEMDHYREPFLNPVDREPLWRFPNELPIAGEPANIVALVEEYMDWLHQSPVPKLLFWGTPGVLIPPAEAARLAKSLPNCKAVDIGPGLNLLQEDNPDLIGSEIARWLSTLEISG

SEQ ID NO: 243 - protein, 125 aa, Synthetic construct
MAEIGTGFPFDPHYVEVLGERMHYVDVGPRDGTPVLFLHGNPTSSYVWRNIIPHVAPTHRCIAPDLIGMGKSDKPDLGYFFDDHVRFMDAFIEALGLEEVVLVIHDWGSALGFHWAKRNPERVKG

SEQ ID NO: 244 - protein, 171 aa, Synthetic construct
AFMEFIRPIPTWDEWPEFARETFQAFRTTDVGRKLIIDQNVFIEGTLPMGVVRPLTEVEMDHYREPFLNPVDREPLWRFPNELPIAGEPANIVALVEEYMDWLHQSPVPKLLFWGTPGVLIPPAEAARLAKSLPNCKAVDIGPGLNLLQEDNPDLIGSEIARWLSTLEISG

SEQ ID NO: 245 - protein, 126 aa, Synthetic construct
MAEIGTGFPFDPHYVEVLGERMHYVDVGPRDGTPVLFLHGNPTSSYVWRNIIPHVAPTHRCIAPDLIGMGKSDKPDLGYFFDDHVRFMDAFIEALGLEEVVLVIHDWGSALGFHWAKRNPERVKGI

SEQ ID NO: 246 - protein, 170 aa, Synthetic construct
FMEFIRPIPTWDEWPEFARETFQAFRTTDVGRKLIIDQNVFIEGTLPMGVVRPLTEVEMDHYREPFLNPVDREPLWRFPNELPIAGEPANIVALVEEYMDWLHQSPVPKLLFWGTPGVLIPPAEAARLAKSLPNCKAVDIGPGLNLLQEDNPDLIGSEIARWLSTLEISG

SEQ ID NO: 247 - protein, 127 aa, Synthetic construct
MAEIGTGFPFDPHYVEVLGERMHYVDVGPRDGTPVLFLHGNPTSSYVWRNIIPHVAPTHRCIAPDLIGMGKSDKPDLGYFFDDHVRFMDAFIEALGLEEVVLVIHDWGSALGFHWAKRNPERVKGIA

SEQ ID NO: 248 - protein, 169 aa, Synthetic construct
MEFIRPIPTWDEWPEFARETFQAFRTTDVGRKLIIDQNVFIEGTLPMGVVRPLTEVEMDHYREPFLNPVDREPLWRFPNELPIAGEPANIVALVEEYMDWLHQSPVPKLLFWGTPGVLIPPAEAARLAKSLPNCKAVDIGPGLNLLQEDNPDLIGSEIARWLSTLEISG

SEQ ID NO: 249 - protein, 128 aa, Synthetic construct
MAEIGTGFPFDPHYVEVLGERMHYVDVGPRDGTPVLFLHGNPTSSYVWRNIIPHVAPTHRCIAPDLIGMGKSDKPDLGYFFDDHVRFMDAFIEALGLEEVVLVIHDWGSALGFHWAKRNPERVKGIAF

SEQ ID NO: 250 - protein, 168 aa, Synthetic construct
EFIRPIPTWDEWPEFARETFQAFRTTDVGRKLIIDQNVFIEGTLPMGVVRPLTEVEMDHYREPFLNPVDREPLWRFPNELPIAGEPANIVALVEEYMDWLHQSPVPKLLFWGTPGVLIPPAEAARLAKSLPNCKAVDIGPGLNLLQEDNPDLIGSEIARWLSTLEISG

SEQ ID NO: 251 - protein, 129 aa, Synthetic construct
MAEIGTGFPFDPHYVEVLGERMHYVDVGPRDGTPVLFLHGNPTSSYVWRNIIPHVAPTHRCIAPDLIGMGKSDKPDLGYFFDDHVRFMDAFIEALGLEEVVLVIHDWGSALGFHWAKRNPERVKGIAFM

SEQ ID NO: 252 - protein, 167 aa, Synthetic construct
FIRPIPTWDEWPEFARETFQAFRTTDVGRKLIIDQNVFIEGTLPMGVVRPLTEVEMDHYREPFLNPVDREPLWRFPNELPIAGEPANIVALVEEYMDWLHQSPVPKLLFWGTPGVLIPPAEAARLAKSLPNCKAVDIGPGLNLLQEDNPDLIGSEIARWLSTLEISG

SEQ ID NO: 253 - protein, 130 aa, Synthetic construct
MAEIGTGFPFDPHYVEVLGERMHYVDVGPRDGTPVLFLHGNPTSSYVWRNIIPHVAPTHRCIAPDLIGMGKSDKPDLGYFFDDHVRFMDAFIEALGLEEVVLVIHDWGSALGFHWAKRNPERVKGIAFME

SEQ ID NO: 254 - protein, 166 aa, Synthetic construct
IRPIPTWDEWPEFARETFQAFRTTDVGRKLIIDQNVFIEGTLPMGVVRPLTEVEMDHYREPFLNPVDREPLWRFPNELPIAGEPANIVALVEEYMDWLHQSPVPKLLFWGTPGVLIPPAEAARLAKSLPNCKAVDIGPGLNLLQEDNPDLIGSEIARWLSTLEISG

SEQ ID NO: 255 - protein, 131 aa, Synthetic construct
MAEIGTGFPFDPHYVEVLGERMHYVDVGPRDGTPVLFLHGNPTSSYVWRNIIPHVAPTHRCIAPDLIGMGKSDKPDLGYFFDDHVRFMDAFIEALGLEEVVLVIHDWGSALGFHWAKRNPERVKGIAFMEF

SEQ ID NO: 256 - protein, 165 aa, Synthetic construct
RPIPTWDEWPEFARETFQAFRTTDVGRKLIIDQNVFIEGTLPMGVVRPLTEVEMDHYREPFLNPVDREPLWRFPNELPIAGEPANIVALVEEYMDWLHQSPVPKLLFWGTPGVLIPPAEAARLAKSLPNCKAVDIGPGLNLLQEDNPDLIGSEIARWLSTLEISG

SEQ ID NO: 257 - protein, 132 aa, Synthetic construct
MAEIGTGFPFDPHYVEVLGERMHYVDVGPRDGTPVLFLHGNPTSSYVWRNIIPHVAPTHRCIAPDLIGMGKSDKPDLGYFFDDHVRFMDAFIEALGLEEVVLVIHDWGSALGFHWAKRNPERVKGIAFMEFI

SEQ ID NO: 258 - protein, 164 aa, Synthetic construct
PIPTWDEWPEFARETFQAFRTTDVGRKLIIDQNVFIEGTLPMGVVRPLTEVEMDHYREPFLNPVDREPLWRFPNELPIAGEPANIVALVEEYMDWLHQSPVPKLLFWGTPGVLIPPAEAARLAKSLPNCKAVDIGPGLNLLQEDNPDLIGSEIARWLSTLEISG

SEQ ID NO: 259 - protein, 133 aa, Synthetic construct
MAEIGTGFPFDPHYVEVLGERMHYVDVGPRDGTPVLFLHGNPTSSYVWRNIIPHVAPTHRCIAPDLIGMGKSDKPDLGYFFDDHVRFMDAFIEALGLEEVVLVIHDWGSALGFHWAKRNPERVKGIAFMEFIR

SEQ ID NO: 260 - protein, 163 aa, Synthetic construct
IPTWDEWPEFARETFQAFRTTDVGRKLIIDQNVFIEGTLPMGVVRPLTEVEMDHYREPFLNPVDREPLWRFPNELPIAGEPANIVALVEEYMDWLHQSPVPKLLFWGTPGVLIPPAEAARLAKSLPNCKAVDIGPGLNLLQEDNPDLIGSEIARWLSTLEISG

SEQ ID NO: 261 - protein, 134 aa, Synthetic construct
MAEIGTGFPFDPHYVEVLGERMHYVDVGPRDGTPVLFLHGNPTSSYVWRNIIPHVAPTHRCIAPDLIGMGKSDKPDLGYFFDDHVRFMDAFIEALGLEEVVLVIHDWGSALGFHWAKRNPERVKGIAFMEFIRP

SEQ ID NO: 262 - protein, 162 aa, Synthetic construct
PTWDEWPEFARETFQAFRTTDVGRKLIIDQNVFIEGTLPMGVVRPLTEVEMDHYREPFLNPVDREPLWRFPNELPIAGEPANIVALVEEYMDWLHQSPVPKLLFWGTPGVLIPPAEAARLAKSLPNCKAVDIGPGLNLLQEDNPDLIGSEIARWLSTLEISG

SEQ ID NO: 263 - protein, 135 aa, Synthetic construct
MAEIGTGFPFDPHYVEVLGERMHYVDVGPRDGTPVLFLHGNPTSSYVWRNIIPHVAPTHRCIAPDLIGMGKSDKPDLGYFFDDHVRFMDAFIEALGLEEVVLVIHDWGSALGFHWAKRNPERVKGIAFMEFIRPI

SEQ ID NO: 264 - protein, 161 aa, Synthetic construct
TWDEWPEFARETFQAFRTTDVGRKLIIDQNVFIEGTLPMGVVRPLTEVEMDHYREPFLNPVDREPLWRFPNELPIAGEPANIVALVEEYMDWLHQSPVPKLLFWGTPGVLIPPAEAARLAKSLPNCKAVDIGPGLNLLQEDNPDLIGSEIARWLSTLEISG

SEQ ID NO: 265 - protein, 136 aa, Synthetic construct
MAEIGTGFPFDPHYVEVLGERMHYVDVGPRDGTPVLFLHGNPTSSYVWRNIIPHVAPTHRCIAPDLIGMGKSDKPDLGYFFDDHVRFMDAFIEALGLEEVVLVIHDWGSALGFHWAKRNPERVKGIAFMEFIRPIP

SEQ ID NO: 266 - protein, 160 aa, Synthetic construct
WDEWPEFARETFQAFRTTDVGRKLIIDQNVFIEGTLPMGVVRPLTEVEMDHYREPFLNPVDREPLWRFPNELPIAGEPANIVALVEEYMDWLHQSPVPKLLFWGTPGVLIPPAEAARLAKSLPNCKAVDIGPGLNLLQEDNPDLIGSEIARWLSTLEISG

SEQ ID NO: 267 - protein, 137 aa, Synthetic construct
MAEIGTGFPFDPHYVEVLGERMHYVDVGPRDGTPVLFLHGNPTSSYVWRNIIPHVAPTHRCIAPDLIGMGKSDKPDLGYFFDDHVRFMDAFIEALGLEEVVLVIHDWGSALGFHWAKRNPERVKGIAFMEFIRPIPT

SEQ ID NO: 268 - protein, 159 aa, Synthetic construct
DEWPEFARETFQAFRTTDVGRKLIIDQNVFIEGTLPMGVVRPLTEVEMDHYREPFLNPVDREPLWRFPNELPIAGEPANIVALVEEYMDWLHQSPVPKLLFWGTPGVLIPPAEAARLAKSLPNCKAVDIGPGLNLLQEDNPDLIGSEIARWLSTLEISG

SEQ ID NO: 269 - protein, 138 aa, Synthetic construct
MAEIGTGFPFDPHYVEVLGERMHYVDVGPRDGTPVLFLHGNPTSSYVWRNIIPHVAPTHRCIAPDLIGMGKSDKPDLGYFFDDHVRFMDAFIEALGLEEVVLVIHDWGSALGFHWAKRNPERVKGIAFMEFIRPIPTW

SEQ ID NO: 270 - protein, 158 aa, Synthetic construct
EWPEFARETFQAFRTTDVGRKLIIDQNVFIEGTLPMGVVRPLTEVEMDHYREPFLNPVDREPLWRFPNELPIAGEPANIVALVEEYMDWLHQSPVPKLLFWGTPGVLIPPAEAARLAKSLPNCKAVDIGPGLNLLQEDNPDLIGSEIARWLSTLEISG

SEQ ID NO: 271 - protein, 139 aa, Synthetic construct
MAEIGTGFPFDPHYVEVLGERMHYVDVGPRDGTPVLFLHGNPTSSYVWRNIIPHVAPTHRCIAPDLIGMGKSDKPDLGYFFDDHVRFMDAFIEALGLEEVVLVIHDWGSALGFHWAKRNPERVKGIAFMEFIRPIPTWD

SEQ ID NO: 272 - protein, 157 aa, Synthetic construct
WPEFARETFQAFRTTDVGRKLIIDQNVFIEGTLPMGVVRPLTEVEMDHYREPFLNPVDREPLWRFPNELPIAGEPANIVALVEEYMDWLHQSPVPKLLFWGTPGVLIPPAEAARLAKSLPNCKAVDIGPGLNLLQEDNPDLIGSEIARWLSTLEISG

SEQ ID NO: 273 - protein, 140 aa, Synthetic construct
MAEIGTGFPFDPHYVEVLGERMHYVDVGPRDGTPVLFLHGNPTSSYVWRNIIPHVAPTHRCIAPDLIGMGKSDKPDLGYFFDDHVRFMDAFIEALGLEEVVLVIHDWGSALGFHWAKRNPERVKGIAFMEFIRPIPTWDE

SEQ ID NO: 274 - protein, 156 aa, Synthetic construct
PEFARETFQAFRTTDVGRKLIIDQNVFIEGTLPMGVVRPLTEVEMDHYREPFLNPVDREPLWRFPNELPIAGEPANIVALVEEYMDWLHQSPVPKLLFWGTPGVLIPPAEAARLAKSLPNCKAVDIGPGLNLLQEDNPDLIGSEIARWLSTLEISG

SEQ ID NO: 275 - protein, 141 aa, Synthetic construct
MAEIGTGFPFDPHYVEVLGERMHYVDVGPRDGTPVLFLHGNPTSSYVWRNIIPHVAPTHRCIAPDLIGMGKSDKPDLGYFFDDHVRFMDAFIEALGLEEVVLVIHDWGSALGFHWAKRNPERVKGIAFMEFIRPIPTWDEW

SEQ ID NO: 276 - protein, 155 aa, Synthetic construct
EFARETFQAFRTTDVGRKLIIDQNVFIEGTLPMGVVRPLTEVEMDHYREPFLNPVDREPLWRFPNELPIAGEPANIVALVEEYMDWLHQSPVPKLLFWGTPGVLIPPAEAARLAKSLPNCKAVDIGPGLNLLQEDNPDLIGSEIARWLSTLEISG

SEQ ID NO: 277 - protein, 142 aa, Synthetic construct
MAEIGTGFPFDPHYVEVLGERMHYVDVGPRDGTPVLFLHGNPTSSYVWRNIIPHVAPTHRCIAPDLIGMGKSDKPDLGYFFDDHVRFMDAFIEALGLEEVVLVIHDWGSALGFHWAKRNPERVKGIAFMEFIRPIPTWDEWP

SEQ ID NO: 278 - protein, 154 aa, Synthetic construct
FARETFQAFRTTDVGRKLIIDQNVFIEGTLPMGVVRPLTEVEMDHYREPFLNPVDREPLWRFPNELPIAGEPANIVALVEEYMDWLHQSPVPKLLFWGTPGVLIPPAEAARLAKSLPNCKAVDIGPGLNLLQEDNPDLIGSEIARWLSTLEISG

SEQ ID NO: 279 - protein, 143 aa, Synthetic construct
MAEIGTGFPFDPHYVEVLGERMHYVDVGPRDGTPVLFLHGNPTSSYVWRNIIPHVAPTHRCIAPDLIGMGKSDKPDLGYFFDDHVRFMDAFIEALGLEEVVLVIHDWGSALGFHWAKRNPERVKGIAFMEFIRPIPTWDEWPE

SEQ ID NO: 280 - protein, 153 aa, Synthetic construct
ARETFQAFRTTDVGRKLIIDQNVFIEGTLPMGVVRPLTEVEMDHYREPFLNPVDREPLWRFPNELPIAGEPANIVALVEEYMDWLHQSPVPKLLFWGTPGVLIPPAEAARLAKSLPNCKAVDIGPGLNLLQEDNPDLIGSEIARWLSTLEISG

SEQ ID NO: 281 - protein, 144 aa, Synthetic construct
MAEIGTGFPFDPHYVEVLGERMHYVDVGPRDGTPVLFLHGNPTSSYVWRNIIPHVAPTHRCIAPDLIGMGKSDKPDLGYFFDDHVRFMDAFIEALGLEEVVLVIHDWGSALGFHWAKRNPERVKGIAFMEFIRPIPTWDEWPEF

SEQ ID NO: 282 - protein, 152 aa, Synthetic construct
RETFQAFRTTDVGRKLIIDQNVFIEGTLPMGVVRPLTEVEMDHYREPFLNPVDREPLWRFPNELPIAGEPANIVALVEEYMDWLHQSPVPKLLFWGTPGVLIPPAEAARLAKSLPNCKAVDIGPGLNLLQEDNPDLIGSEIARWLSTLEISG

SEQ ID NO: 283 - protein, 145 aa, Synthetic construct
MAEIGTGFPFDPHYVEVLGERMHYVDVGPRDGTPVLFLHGNPTSSYVWRNIIPHVAPTHRCIAPDLIGMGKSDKPDLGYFFDDHVRFMDAFIEALGLEEVVLVIHDWGSALGFHWAKRNPERVKGIAFMEFIRPIPTWDEWPEFA

SEQ ID NO: 284 - protein, 151 aa, Synthetic construct
ETFQAFRTTDVGRKLIIDQNVFIEGTLPMGVVRPLTEVEMDHYREPFLNPVDREPLWRFPNELPIAGEPANIVALVEEYMDWLHQSPVPKLLFWGTPGVLIPPAEAARLAKSLPNCKAVDIGPGLNLLQEDNPDLIGSEIARWLSTLEISG

SEQ ID NO: 285 - protein, 146 aa, Synthetic construct
MAEIGTGFPFDPHYVEVLGERMHYVDVGPRDGTPVLFLHGNPTSSYVWRNIIPHVAPTHRCIAPDLIGMGKSDKPDLGYFFDDHVRFMDAFIEALGLEEVVLVIHDWGSALGFHWAKRNPERVKGIAFMEFIRPIPTWDEWPEFAR

SEQ ID NO: 286 - protein, 150 aa, Synthetic construct
TFQAFRTTDVGRKLIIDQNVFIEGTLPMGVVRPLTEVEMDHYREPFLNPVDREPLWRFPNELPIAGEPANIVALVEEYMDWLHQSPVPKLLFWGTPGVLIPPAEAARLAKSLPNCKAVDIGPGLNLLQEDNPDLIGSEIARWLSTLEISG

SEQ ID NO: 287 - protein, 147 aa, Synthetic construct
MAEIGTGFPFDPHYVEVLGERMHYVDVGPRDGTPVLFLHGNPTSSYVWRNIIPHVAPTHRCIAPDLIGMGKSDKPDLGYFFDDHVRFMDAFIEALGLEEVVLVIHDWGSALGFHWAKRNPERVKGIAFMEFIRPIPTWDEWPEFARE

SEQ ID NO: 288 - protein, 149 aa, Synthetic construct
FQAFRTTDVGRKLIIDQNVFIEGTLPMGVVRPLTEVEMDHYREPFLNPVDREPLWRFPNELPIAGEPANIVALVEEYMDWLHQSPVPKLLFWGTPGVLIPPAEAARLAKSLPNCKAVDIGPGLNLLQEDNPDLIGSEIARWLSTLEISG

SEQ ID NO: 289 - protein, 148 aa, Synthetic construct
MAEIGTGFPFDPHYVEVLGERMHYVDVGPRDGTPVLFLHGNPTSSYVWRNIIPHVAPTHRCIAPDLIGMGKSDKPDLGYFFDDHVRFMDAFIEALGLEEVVLVIHDWGSALGFHWAKRNPERVKGIAFMEFIRPIPTWDEWPEFARET

SEQ ID NO: 290 - protein, 148 aa, Synthetic construct
QAFRTTDVGRKLIIDQNVFIEGTLPMGVVRPLTEVEMDHYREPFLNPVDREPLWRFPNELPIAGEPANIVALVEEYMDWLHQSPVPKLLFWGTPGVLIPPAEAARLAKSLPNCKAVDIGPGLNLLQEDNPDLIGSEIARWLSTLEISG

SEQ ID NO: 291 - protein, 149 aa, Synthetic construct
MAEIGTGFPFDPHYVEVLGERMHYVDVGPRDGTPVLFLHGNPTSSYVWRNIIPHVAPTHRCIAPDLIGMGKSDKPDLGYFFDDHVRFMDAFIEALGLEEVVLVIHDWGSALGFHWAKRNPERVKGIAFMEFIRPIPTWDEWPEFARETF

SEQ ID NO: 292 - protein, 147 aa, Synthetic construct
AFRTTDVGRKLIIDQNVFIEGTLPMGVVRPLTEVEMDHYREPFLNPVDREPLWRFPNELPIAGEPANIVALVEEYMDWLHQSPVPKLLFWGTPGVLIPPAEAARLAKSLPNCKAVDIGPGLNLLQEDNPDLIGSEIARWLSTLEISG

SEQ ID NO: 293 - protein, 150 aa, Synthetic construct
MAEIGTGFPFDPHYVEVLGERMHYVDVGPRDGTPVLFLHGNPTSSYVWRNIIPHVAPTHRCIAPDLIGMGKSDKPDLGYFFDDHVRFMDAFIEALGLEEVVLVIHDWGSALGFHWAKRNPERVKGIAFMEFIRPIPTWDEWPEFARETFQ

SEQ ID NO: 294 - protein, 146 aa, Synthetic construct
FRTTDVGRKLIIDQNVFIEGTLPMGVVRPLTEVEMDHYREPFLNPVDREPLWRFPNELPIAGEPANIVALVEEYMDWLHQSPVPKLLFWGTPGVLIPPAEAARLAKSLPNCKAVDIGPGLNLLQEDNPDLIGSEIARWLSTLEISG

SEQ ID NO: 295 - protein, 151 aa, Synthetic construct
MAEIGTGFPFDPHYVEVLGERMHYVDVGPRDGTPVLFLHGNPTSSYVWRNIIPHVAPTHRCIAPDLIGMGKSDKPDLGYFFDDHVRFMDAFIEALGLEEVVLVIHDWGSALGFHWAKRNPERVKGIAFMEFIRPIPTWDEWPEFARETFQA

SEQ ID NO: 296 - protein, 145 aa, Synthetic construct
RTTDVGRKLIIDQNVFIEGTLPMGVVRPLTEVEMDHYREPFLNPVDREPLWRFPNELPIAGEPANIVALVEEYMDWLHQSPVPKLLFWGTPGVLIPPAEAARLAKSLPNCKAVDIGPGLNLLQEDNPDLIGSEIARWLSTLEISG

SEQ ID NO: 297 - protein, 152 aa, Synthetic construct
MAEIGTGFPFDPHYVEVLGERMHYVDVGPRDGTPVLFLHGNPTSSYVWRNIIPHVAPTHRCIAPDLIGMGKSDKPDLGYFFDDHVRFMDAFIEALGLEEVVLVIHDWGSALGFHWAKRNPERVKGIAFMEFIRPIPTWDEWPEFARETFQAF

SEQ ID NO: 298 - protein, 144 aa, Synthetic construct
TTDVGRKLIIDQNVFIEGTLPMGVVRPLTEVEMDHYREPFLNPVDREPLWRFPNELPIAGEPANIVALVEEYMDWLHQSPVPKLLFWGTPGVLIPPAEAARLAKSLPNCKAVDIGPGLNLLQEDNPDLIGSEIARWLSTLEISG

SEQ ID NO: 299 - protein, 153 aa, Synthetic construct
MAEIGTGFPFDPHYVEVLGERMHYVDVGPRDGTPVLFLHGNPTSSYVWRNIIPHVAPTHRCIAPDLIGMGKSDKPDLGYFFDDHVRFMDAFIEALGLEEVVLVIHDWGSALGFHWAKRNPERVKGIAFMEFIRPIPTWDEWPEFARETFQAFR

SEQ ID NO: 300 - protein, 143 aa, Synthetic construct
TDVGRKLIIDQNVFIEGTLPMGVVRPLTEVEMDHYREPFLNPVDREPLWRFPNELPIAGEPANIVALVEEYMDWLHQSPVPKLLFWGTPGVLIPPAEAARLAKSLPNCKAVDIGPGLNLLQEDNPDLIGSEIARWLSTLEISG

SEQ ID NO: 301 - protein, 154 aa, Synthetic construct
MAEIGTGFPFDPHYVEVLGERMHYVDVGPRDGTPVLFLHGNPTSSYVWRNIIPHVAPTHRCIAPDLIGMGKSDKPDLGYFFDDHVRFMDAFIEALGLEEVVLVIHDWGSALGFHWAKRNPERVKGIAFMEFIRPIPTWDEWPEFARETFQAFRT

SEQ ID NO: 302 - protein, 142 aa, Synthetic construct
DVGRKLIIDQNVFIEGTLPMGVVRPLTEVEMDHYREPFLNPVDREPLWRFPNELPIAGEPANIVALVEEYMDWLHQSPVPKLLFWGTPGVLIPPAEAARLAKSLPNCKAVDIGPGLNLLQEDNPDLIGSEIARWLSTLEISG

SEQ ID NO: 303 - protein, 155 aa, Synthetic construct
MAEIGTGFPFDPHYVEVLGERMHYVDVGPRDGTPVLFLHGNPTSSYVWRNIIPHVAPTHRCIAPDLIGMGKSDKPDLGYFFDDHVRFMDAFIEALGLEEVVLVIHDWGSALGFHWAKRNPERVKGIAFMEFIRPIPTWDEWPEFARETFQAFRTT

SEQ ID NO: 304 - protein, 141 aa, Synthetic construct
VGRKLIIDQNVFIEGTLPMGVVRPLTEVEMDHYREPFLNPVDREPLWRFPNELPIAGEPANIVALVEEYMDWLHQSPVPKLLFWGTPGVLIPPAEAARLAKSLPNCKAVDIGPGLNLLQEDNPDLIGSEIARWLSTLEISG

SEQ ID NO: 305 - protein, 156 aa, Synthetic construct
MAEIGTGFPFDPHYVEVLGERMHYVDVGPRDGTPVLFLHGNPTSSYVWRNIIPHVAPTHRCIAPDLIGMGKSDKPDLGYFFDDHVRFMDAFIEALGLEEVVLVIHDWGSALGFHWAKRNPERVKGIAFMEFIRPIPTWDEWPEFARETFQAFRTTD

SEQ ID NO: 306 - protein, 140 aa, Synthetic construct
GRKLIIDQNVFIEGTLPMGVVRPLTEVEMDHYREPFLNPVDREPLWRFPNELPIAGEPANIVALVEEYMDWLHQSPVPKLLFWGTPGVLIPPAEAARLAKSLPNCKAVDIGPGLNLLQEDNPDLIGSEIARWLSTLEISG

SEQ ID NO: 307 - protein, 157 aa, Synthetic construct
MAEIGTGFPFDPHYVEVLGERMHYVDVGPRDGTPVLFLHGNPTSSYVWRNIIPHVAPTHRCIAPDLIGMGKSDKPDLGYFFDDHVRFMDAFIEALGLEEVVLVIHDWGSALGFHWAKRNPERVKGIAFMEFIRPIPTWDEWPEFARETFQAFRTTDV

SEQ ID NO: 308 - protein, 139 aa, Synthetic construct
RKLIIDQNVFIEGTLPMGVVRPLTEVEMDHYREPFLNPVDREPLWRFPNELPIAGEPANIVALVEEYMDWLHQSPVPKLLFWGTPGVLIPPAEAARLAKSLPNCKAVDIGPGLNLLQEDNPDLIGSEIARWLSTLEISG

SEQ ID NO: 309 - protein, 158 aa, Synthetic construct
MAEIGTGFPFDPHYVEVLGERMHYVDVGPRDGTPVLFLHGNPTSSYVWRNIIPHVAPTHRCIAPDLIGMGKSDKPDLGYFFDDHVRFMDAFIEALGLEEVVLVIHDWGSALGFHWAKRNPERVKGIAFMEFIRPIPTWDEWPEFARETFQAFRTTDVG

SEQ ID NO: 310 - protein, 138 aa, Synthetic construct
KLIIDQNVFIEGTLPMGVVRPLTEVEMDHYREPFLNPVDREPLWRFPNELPIAGEPANIVALVEEYMDWLHQSPVPKLLFWGTPGVLIPPAEAARLAKSLPNCKAVDIGPGLNLLQEDNPDLIGSEIARWLSTLEISG

SEQ ID NO: 311 - protein, 159 aa, Synthetic construct
MAEIGTGFPFDPHYVEVLGERMHYVDVGPRDGTPVLFLHGNPTSSYVWRNIIPHVAPTHRCIAPDLIGMGKSDKPDLGYFFDDHVRFMDAFIEALGLEEVVLVIHDWGSALGFHWAKRNPERVKGIAFMEFIRPIPTWDEWPEFARETFQAFRTTDVGR

SEQ ID NO: 312 - protein, 137 aa, Synthetic construct
LIIDQNVFIEGTLPMGVVRPLTEVEMDHYREPFLNPVDREPLWRFPNELPIAGEPANIVALVEEYMDWLHQSPVPKLLFWGTPGVLIPPAEAARLAKSLPNCKAVDIGPGLNLLQEDNPDLIGSEIARWLSTLEISG

SEQ ID NO: 313 - protein, 160 aa, Synthetic construct
MAEIGTGFPFDPHYVEVLGERMHYVDVGPRDGTPVLFLHGNPTSSYVWRNIIPHVAPTHRCIAPDLIGMGKSDKPDLGYFFDDHVRFMDAFIEALGLEEVVLVIHDWGSALGFHWAKRNPERVKGIAFMEFIRPIPTWDEWPEFARETFQAFRTTDVGRK

SEQ ID NO: 314 - protein, 136 aa, Synthetic construct
IIDQNVFIEGTLPMGVVRPLTEVEMDHYREPFLNPVDREPLWRFPNELPIAGEPANIVALVEEYMDWLHQSPVPKLLFWGTPGVLIPPAEAARLAKSLPNCKAVDIGPGLNLLQEDNPDLIGSEIARWLSTLEISG

SEQ ID NO: 315 - protein, 161 aa, Synthetic construct
MAEIGTGFPFDPHYVEVLGERMHYVDVGPRDGTPVLFLHGNPTSSYVWRNIIPHVAPTHRCIAPDLIGMGKSDKPDLGYFFDDHVRFMDAFIEALGLEEVVLVIHDWGSALGFHWAKRNPERVKGIAFMEFIRPIPTWDEWPEFARETFQAFRTTDVGRKL

SEQ ID NO: 316 - protein, 135 aa, Synthetic construct
IDQNVFIEGTLPMGVVRPLTEVEMDHYREPFLNPVDREPLWRFPNELPIAGEPANIVALVEEYMDWLHQSPVPKLLFWGTPGVLIPPAEAARLAKSLPNCKAVDIGPGLNLLQEDNPDLIGSEIARWLSTLEISG

SEQ ID NO: 317 - protein, 162 aa, Synthetic construct
MAEIGTGFPFDPHYVEVLGERMHYVDVGPRDGTPVLFLHGNPTSSYVWRNIIPHVAPTHRCIAPDLIGMGKSDKPDLGYFFDDHVRFMDAFIEALGLEEVVLVIHDWGSALGFHWAKRNPERVKGIAFMEFIRPIPTWDEWPEFARETFQAFRTTDVGRKLI

SEQ ID NO: 318 - protein, 134 aa, Synthetic construct
DQNVFIEGTLPMGVVRPLTEVEMDHYREPFLNPVDREPLWRFPNELPIAGEPANIVALVEEYMDWLHQSPVPKLLFWGTPGVLIPPAEAARLAKSLPNCKAVDIGPGLNLLQEDNPDLIGSEIARWLSTLEISG

SEQ ID NO: 319 - protein, 163 aa, Synthetic construct
MAEIGTGFPFDPHYVEVLGERMHYVDVGPRDGTPVLFLHGNPTSSYVWRNIIPHVAPTHRCIAPDLIGMGKSDKPDLGYFFDDHVRFMDAFIEALGLEEVVLVIHDWGSALGFHWAKRNPERVKGIAFMEFIRPIPTWDEWPEFARETFQAFRTTDVGRKLII

SEQ ID NO: 320 - protein, 133 aa, Synthetic construct
QNVFIEGTLPMGVVRPLTEVEMDHYREPFLNPVDREPLWRFPNELPIAGEPANIVALVEEYMDWLHQSPVPKLLFWGTPGVLIPPAEAARLAKSLPNCKAVDIGPGLNLLQEDNPDLIGSEIARWLSTLEISG

SEQ ID NO: 321 - protein, 164 aa, Synthetic construct
MAEIGTGFPFDPHYVEVLGERMHYVDVGPRDGTPVLFLHGNPTSSYVWRNIIPHVAPTHRCIAPDLIGMGKSDKPDLGYFFDDHVRFMDAFIEALGLEEVVLVIHDWGSALGFHWAKRNPERVKGIAFMEFIRPIPTWDEWPEFARETFQAFRTTDVGRKLIID

SEQ ID NO: 322 - protein, 132 aa, Synthetic construct
NVFIEGTLPMGVVRPLTEVEMDHYREPFLNPVDREPLWRFPNELPIAGEPANIVALVEEYMDWLHQSPVPKLLFWGTPGVLIPPAEAARLAKSLPNCKAVDIGPGLNLLQEDNPDLIGSEIARWLSTLEISG

SEQ ID NO: 323 - protein, 165 aa, Synthetic construct
MAEIGTGFPFDPHYVEVLGERMHYVDVGPRDGTPVLFLHGNPTSSYVWRNIIPHVAPTHRCIAPDLIGMGKSDKPDLGYFFDDHVRFMDAFIEALGLEEVVLVIHDWGSALGFHWAKRNPERVKGIAFMEFIRPIPTWDEWPEFARETFQAFRTTDVGRKLIIDQ

SEQ ID NO: 324 - protein, 131 aa, Synthetic construct
VFIEGTLPMGVVRPLTEVEMDHYREPFLNPVDREPLWRFPNELPIAGEPANIVALVEEYMDWLHQSPVPKLLFWGTPGVLIPPAEAARLAKSLPNCKAVDIGPGLNLLQEDNPDLIGSEIARWLSTLEISG

SEQ ID NO: 325 - protein, 166 aa, Synthetic construct
MAEIGTGFPFDPHYVEVLGERMHYVDVGPRDGTPVLFLHGNPTSSYVWRNIIPHVAPTHRCIAPDLIGMGKSDKPDLGYFFDDHVRFMDAFIEALGLEEVVLVIHDWGSALGFHWAKRNPERVKGIAFMEFIRPIPTWDEWPEFARETFQAFRTTDVGRKLIIDQN

SEQ ID NO: 326 - protein, 130 aa, Synthetic construct
FIEGTLPMGVVRPLTEVEMDHYREPFLNPVDREPLWRFPNELPIAGEPANIVALVEEYMDWLHQSPVPKLLFWGTPGVLIPPAEAARLAKSLPNCKAVDIGPGLNLLQEDNPDLIGSEIARWLSTLEISG

SEQ ID NO: 327 - protein, 167 aa, Synthetic construct
MAEIGTGFPFDPHYVEVLGERMHYVDVGPRDGTPVLFLHGNPTSSYVWRNIIPHVAPTHRCIAPDLIGMGKSDKPDLGYFFDDHVRFMDAFIEALGLEEVVLVIHDWGSALGFHWAKRNPERVKGIAFMEFIRPIPTWDEWPEFARETFQAFRTTDVGRKLIIDQNV

SEQ ID NO: 328 - protein, 129 aa, Synthetic construct
IEGTLPMGVVRPLTEVEMDHYREPFLNPVDREPLWRFPNELPIAGEPANIVALVEEYMDWLHQSPVPKLLFWGTPGVLIPPAEAARLAKSLPNCKAVDIGPGLNLLQEDNPDLIGSEIARWLSTLEISG

SEQ ID NO: 329 - protein, 168 aa, Synthetic construct
MAEIGTGFPFDPHYVEVLGERMHYVDVGPRDGTPVLFLHGNPTSSYVWRNIIPHVAPTHRCIAPDLIGMGKSDKPDLGYFFDDHVRFMDAFIEALGLEEVVLVIHDWGSALGFHWAKRNPERVKGIAFMEFIRPIPTWDEWPEFARETFQAFRTTDVGRKLIIDQNVF

SEQ ID NO: 330 - protein, 128 aa, Synthetic construct
EGTLPMGVVRPLTEVEMDHYREPFLNPVDREPLWRFPNELPIAGEPANIVALVEEYMDWLHQSPVPKLLFWGTPGVLIPPAEAARLAKSLPNCKAVDIGPGLNLLQEDNPDLIGSEIARWLSTLEISG

SEQ ID NO: 331 - protein, 169 aa, Synthetic construct
MAEIGTGFPFDPHYVEVLGERMHYVDVGPRDGTPVLFLHGNPTSSYVWRNIIPHVAPTHRCIAPDLIGMGKSDKPDLGYFFDDHVRFMDAFIEALGLEEVVLVIHDWGSALGFHWAKRNPERVKGIAFMEFIRPIPTWDEWPEFARETFQAFRTTDVGRKLIIDQNVFI

SEQ ID NO: 332 - protein, 127 aa, Synthetic construct
GTLPMGVVRPLTEVEMDHYREPFLNPVDREPLWRFPNELPIAGEPANIVALVEEYMDWLHQSPVPKLLFWGTPGVLIPPAEAARLAKSLPNCKAVDIGPGLNLLQEDNPDLIGSEIARWLSTLEISG

SEQ ID NO: 333 - protein, 170 aa, Synthetic construct
MAEIGTGFPFDPHYVEVLGERMHYVDVGPRDGTPVLFLHGNPTSSYVWRNIIPHVAPTHRCIAPDLIGMGKSDKPDLGYFFDDHVRFMDAFIEALGLEEVVLVIHDWGSALGFHWAKRNPERVKGIAFMEFIRPIPTWDEWPEFARETFQAFRTTDVGRKLIIDQNVFIE

SEQ ID NO: 334 - protein, 126 aa, Synthetic construct
TLPMGVVRPLTEVEMDHYREPFLNPVDREPLWRFPNELPIAGEPANIVALVEEYMDWLHQSPVPKLLFWGTPGVLIPPAEAARLAKSLPNCKAVDIGPGLNLLQEDNPDLIGSEIARWLSTLEISG

SEQ ID NO: 335 - protein, 171 aa, Synthetic construct
MAEIGTGFPFDPHYVEVLGERMHYVDVGPRDGTPVLFLHGNPTSSYVWRNIIPHVAPTHRCIAPDLIGMGKSDKPDLGYFFDDHVRFMDAFIEALGLEEVVLVIHDWGSALGFHWAKRNPERVKGIAFMEFIRPIPTWDEWPEFARETFQAFRTTDVGRKLIIDQNVFIEG

SEQ ID NO: 336 - protein, 125 aa, Synthetic construct
LPMGVVRPLTEVEMDHYREPFLNPVDREPLWRFPNELPIAGEPANIVALVEEYMDWLHQSPVPKLLFWGTPGVLIPPAEAARLAKSLPNCKAVDIGPGLNLLQEDNPDLIGSEIARWLSTLEISG

SEQ ID NO: 337 - protein, 172 aa, Synthetic construct
MAEIGTGFPFDPHYVEVLGERMHYVDVGPRDGTPVLFLHGNPTSSYVWRNIIPHVAPTHRCIAPDLIGMGKSDKPDLGYFFDDHVRFMDAFIEALGLEEVVLVIHDWGSALGFHWAKRNPERVKGIAFMEFIRPIPTWDEWPEFARETFQAFRTTDVGRKLIIDQNVFIEGT

SEQ ID NO: 338 - protein, 124 aa, Synthetic construct
PMGVVRPLTEVEMDHYREPFLNPVDREPLWRFPNELPIAGEPANIVALVEEYMDWLHQSPVPKLLFWGTPGVLIPPAEAARLAKSLPNCKAVDIGPGLNLLQEDNPDLIGSEIARWLSTLEISG

SEQ ID NO: 339 - protein, 173 aa, Synthetic construct
MAEIGTGFPFDPHYVEVLGERMHYVDVGPRDGTPVLFLHGNPTSSYVWRNIIPHVAPTHRCIAPDLIGMGKSDKPDLGYFFDDHVRFMDAFIEALGLEEVVLVIHDWGSALGFHWAKRNPERVKGIAFMEFIRPIPTWDEWPEFARETFQAFRTTDVGRKLIIDQNVFIEGTL

SEQ ID NO: 340 - protein, 123 aa, Synthetic construct
MGVVRPLTEVEMDHYREPFLNPVDREPLWRFPNELPIAGEPANIVALVEEYMDWLHQSPVPKLLFWGTPGVLIPPAEAARLAKSLPNCKAVDIGPGLNLLQEDNPDLIGSEIARWLSTLEISG

SEQ ID NO: 341 - protein, 174 aa, Synthetic construct
MAEIGTGFPFDPHYVEVLGERMHYVDVGPRDGTPVLFLHGNPTSSYVWRNIIPHVAPTHRCIAPDLIGMGKSDKPDLGYFFDDHVRFMDAFIEALGLEEVVLVIHDWGSALGFHWAKRNPERVKGIAFMEFIRPIPTWDEWPEFARETFQAFRTTDVGRKLIIDQNVFIEGTLP

SEQ ID NO: 342 - protein, 122 aa, Synthetic construct
GVVRPLTEVEMDHYREPFLNPVDREPLWRFPNELPIAGEPANIVALVEEYMDWLHQSPVPKLLFWGTPGVLIPPAEAARLAKSLPNCKAVDIGPGLNLLQEDNPDLIGSEIARWLSTLEISG

SEQ ID NO: 343 - protein, 175 aa, Synthetic construct
MAEIGTGFPFDPHYVEVLGERMHYVDVGPRDGTPVLFLHGNPTSSYVWRNIIPHVAPTHRCIAPDLIGMGKSDKPDLGYFFDDHVRFMDAFIEALGLEEVVLVIHDWGSALGFHWAKRNPERVKGIAFMEFIRPIPTWDEWPEFARETFQAFRTTDVGRKLIIDQNVFIEGTLPM

SEQ ID NO: 344 - protein, 121 aa, Synthetic construct
VVRPLTEVEMDHYREPFLNPVDREPLWRFPNELPIAGEPANIVALVEEYMDWLHQSPVPKLLFWGTPGVLIPPAEAARLAKSLPNCKAVDIGPGLNLLQEDNPDLIGSEIARWLSTLEISG

SEQ ID NO: 345 - protein, 176 aa, Synthetic construct
MAEIGTGFPFDPHYVEVLGERMHYVDVGPRDGTPVLFLHGNPTSSYVWRNIIPHVAPTHRCIAPDLIGMGKSDKPDLGYFFDDHVRFMDAFIEALGLEEVVLVIHDWGSALGFHWAKRNPERVKGIAFMEFIRPIPTWDEWPEFARETFQAFRTTDVGRKLIIDQNVFIEGTLPMG

SEQ ID NO: 346 - protein, 120 aa, Synthetic construct
VRPLTEVEMDHYREPFLNPVDREPLWRFPNELPIAGEPANIVALVEEYMDWLHQSPVPKLLFWGTPGVLIPPAEAARLAKSLPNCKAVDIGPGLNLLQEDNPDLIGSEIARWLSTLEISG

SEQ ID NO: 347 - protein, 177 aa, Synthetic construct
MAEIGTGFPFDPHYVEVLGERMHYVDVGPRDGTPVLFLHGNPTSSYVWRNIIPHVAPTHRCIAPDLIGMGKSDKPDLGYFFDDHVRFMDAFIEALGLEEVVLVIHDWGSALGFHWAKRNPERVKGIAFMEFIRPIPTWDEWPEFARETFQAFRTTDVGRKLIIDQNVFIEGTLPMGV

SEQ ID NO: 348 - protein, 119 aa, Synthetic construct
RPLTEVEMDHYREPFLNPVDREPLWRFPNELPIAGEPANIVALVEEYMDWLHQSPVPKLLFWGTPGVLIPPAEAARLAKSLPNCKAVDIGPGLNLLQEDNPDLIGSEIARWLSTLEISG

SEQ ID NO: 349 - protein, 178 aa, Synthetic construct
MAEIGTGFPFDPHYVEVLGERMHYVDVGPRDGTPVLFLHGNPTSSYVWRNIIPHVAPTHRCIAPDLIGMGKSDKPDLGYFFDDHVRFMDAFIEALGLEEVVLVIHDWGSALGFHWAKRNPERVKGIAFMEFIRPIPTWDEWPEFARETFQAFRTTDVGRKLIIDQNVFIEGTLPMGVV

SEQ ID NO: 350 - protein, 118 aa, Synthetic construct
PLTEVEMDHYREPFLNPVDREPLWRFPNELPIAGEPANIVALVEEYMDWLHQSPVPKLLFWGTPGVLIPPAEAARLAKSLPNCKAVDIGPGLNLLQEDNPDLIGSEIARWLSTLEISG

SEQ ID NO: 351 - protein, 179 aa, Synthetic construct
MAEIGTGFPFDPHYVEVLGERMHYVDVGPRDGTPVLFLHGNPTSSYVWRNIIPHVAPTHRCIAPDLIGMGKSDKPDLGYFFDDHVRFMDAFIEALGLEEVVLVIHDWGSALGFHWAKRNPERVKGIAFMEFIRPIPTWDEWPEFARETFQAFRTTDVGRKLIIDQNVFIEGTLPMGVVR

SEQ ID NO: 352 - protein, 117 aa, Synthetic construct
LTEVEMDHYREPFLNPVDREPLWRFPNELPIAGEPANIVALVEEYMDWLHQSPVPKLLFWGTPGVLIPPAEAARLAKSLPNCKAVDIGPGLNLLQEDNPDLIGSEIARWLSTLEISG

SEQ ID NO: 353 - protein, 180 aa, Synthetic construct
MAEIGTGFPFDPHYVEVLGERMHYVDVGPRDGTPVLFLHGNPTSSYVWRNIIPHVAPTHRCIAPDLIGMGKSDKPDLGYFFDDHVRFMDAFIEALGLEEVVLVIHDWGSALGFHWAKRNPERVKGIAFMEFIRPIPTWDEWPEFARETFQAFRTTDVGRKLIIDQNVFIEGTLPMGVVRP

SEQ ID NO: 354 - protein, 116 aa, Synthetic construct
TEVEMDHYREPFLNPVDREPLWRFPNELPIAGEPANIVALVEEYMDWLHQSPVPKLLFWGTPGVLIPPAEAARLAKSLPNCKAVDIGPGLNLLQEDNPDLIGSEIARWLSTLEISG

SEQ ID NO: 355 - protein, 181 aa, Synthetic construct
MAEIGTGFPFDPHYVEVLGERMHYVDVGPRDGTPVLFLHGNPTSSYVWRNIIPHVAPTHRCIAPDLIGMGKSDKPDLGYFFDDHVRFMDAFIEALGLEEVVLVIHDWGSALGFHWAKRNPERVKGIAFMEFIRPIPTWDEWPEFARETFQAFRTTDVGRKLIIDQNVFIEGTLPMGVVRPL

SEQ ID NO: 356 - protein, 115 aa, Synthetic construct
EVEMDHYREPFLNPVDREPLWRFPNELPIAGEPANIVALVEEYMDWLHQSPVPKLLFWGTPGVLIPPAEAARLAKSLPNCKAVDIGPGLNLLQEDNPDLIGSEIARWLSTLEISG

SEQ ID NO: 357 - protein, 182 aa, Synthetic construct
MAEIGTGFPFDPHYVEVLGERMHYVDVGPRDGTPVLFLHGNPTSSYVWRNIIPHVAPTHRCIAPDLIGMGKSDKPDLGYFFDDHVRFMDAFIEALGLEEVVLVIHDWGSALGFHWAKRNPERVKGIAFMEFIRPIPTWDEWPEFARETFQAFRTTDVGRKLIIDQNVFIEGTLPMGVVRPLT

SEQ ID NO: 358 - protein, 114 aa, Synthetic construct
VEMDHYREPFLNPVDREPLWRFPNELPIAGEPANIVALVEEYMDWLHQSPVPKLLFWGTPGVLIPPAEAARLAKSLPNCKAVDIGPGLNLLQEDNPDLIGSEIARWLSTLEISG

SEQ ID NO: 359 - protein, 183 aa, Synthetic construct
MAEIGTGFPFDPHYVEVLGERMHYVDVGPRDGTPVLFLHGNPTSSYVWRNIIPHVAPTHRCIAPDLIGMGKSDKPDLGYFFDDHVRFMDAFIEALGLEEVVLVIHDWGSALGFHWAKRNPERVKGIAFMEFIRPIPTWDEWPEFARETFQAFRTTDVGRKLIIDQNVFIEGTLPMGVVRPLTE

SEQ ID NO: 360 - protein, 113 aa, Synthetic construct
EMDHYREPFLNPVDREPLWRFPNELPIAGEPANIVALVEEYMDWLHQSPVPKLLFWGTPGVLIPPAEAARLAKSLPNCKAVDIGPGLNLLQEDNPDLIGSEIARWLSTLEISG

SEQ ID NO: 361 - protein, 184 aa, Synthetic construct
MAEIGTGFPFDPHYVEVLGERMHYVDVGPRDGTPVLFLHGNPTSSYVWRNIIPHVAPTHRCIAPDLIGMGKSDKPDLGYFFDDHVRFMDAFIEALGLEEVVLVIHDWGSALGFHWAKRNPERVKGIAFMEFIRPIPTWDEWPEFARETFQAFRTTDVGRKLIIDQNVFIEGTLPMGVVRPLTEV

SEQ ID NO: 362 - protein, 112 aa, Synthetic construct
MDHYREPFLNPVDREPLWRFPNELPIAGEPANIVALVEEYMDWLHQSPVPKLLFWGTPGVLIPPAEAARLAKSLPNCKAVDIGPGLNLLQEDNPDLIGSEIARWLSTLEISG

SEQ ID NO: 363 - protein, 185 aa, Synthetic construct
MAEIGTGFPFDPHYVEVLGERMHYVDVGPRDGTPVLFLHGNPTSSYVWRNIIPHVAPTHRCIAPDLIGMGKSDKPDLGYFFDDHVRFMDAFIEALGLEEVVLVIHDWGSALGFHWAKRNPERVKGIAFMEFIRPIPTWDEWPEFARETFQAFRTTDVGRKLIIDQNVFIEGTLPMGVVRPLTEVE

SEQ ID NO: 364 - protein, 111 aa, Synthetic construct
DHYREPFLNPVDREPLWRFPNELPIAGEPANIVALVEEYMDWLHQSPVPKLLFWGTPGVLIPPAEAARLAKSLPNCKAVDIGPGLNLLQEDNPDLIGSEIARWLSTLEISG

SEQ ID NO: 365 - protein, 186 aa, Synthetic construct
MAEIGTGFPFDPHYVEVLGERMHYVDVGPRDGTPVLFLHGNPTSSYVWRNIIPHVAPTHRCIAPDLIGMGKSDKPDLGYFFDDHVRFMDAFIEALGLEEVVLVIHDWGSALGFHWAKRNPERVKGIAFMEFIRPIPTWDEWPEFARETFQAFRTTDVGRKLIIDQNVFIEGTLPMGVVRPLTEVEM

SEQ ID NO: 366 - protein, 110 aa, Synthetic construct
HYREPFLNPVDREPLWRFPNELPIAGEPANIVALVEEYMDWLHQSPVPKLLFWGTPGVLIPPAEAARLAKSLPNCKAVDIGPGLNLLQEDNPDLIGSEIARWLSTLEISG

SEQ ID NO: 367 - protein, 187 aa, Synthetic construct
MAEIGTGFPFDPHYVEVLGERMHYVDVGPRDGTPVLFLHGNPTSSYVWRNIIPHVAPTHRCIAPDLIGMGKSDKPDLGYFFDDHVRFMDAFIEALGLEEVVLVIHDWGSALGFHWAKRNPERVKGIAFMEFIRPIPTWDEWPEFARETFQAFRTTDVGRKLIIDQNVFIEGTLPMGVVRPLTEVEMD

SEQ ID NO: 368 - protein, 109 aa, Synthetic construct
YREPFLNPVDREPLWRFPNELPIAGEPANIVALVEEYMDWLHQSPVPKLLFWGTPGVLIPPAEAARLAKSLPNCKAVDIGPGLNLLQEDNPDLIGSEIARWLSTLEISG

SEQ ID NO: 369 - protein, 188 aa, Synthetic construct
MAEIGTGFPFDPHYVEVLGERMHYVDVGPRDGTPVLFLHGNPTSSYVWRNIIPHVAPTHRCIAPDLIGMGKSDKPDLGYFFDDHVRFMDAFIEALGLEEVVLVIHDWGSALGFHWAKRNPERVKGIAFMEFIRPIPTWDEWPEFARETFQAFRTTDVGRKLIIDQNVFIEGTLPMGVVRPLTEVEMDH

SEQ ID NO: 370 - protein, 108 aa, Synthetic construct
REPFLNPVDREPLWRFPNELPIAGEPANIVALVEEYMDWLHQSPVPKLLFWGTPGVLIPPAEAARLAKSLPNCKAVDIGPGLNLLQEDNPDLIGSEIARWLSTLEISG

SEQ ID NO: 371 - protein, 189 aa, Synthetic construct
MAEIGTGFPFDPHYVEVLGERMHYVDVGPRDGTPVLFLHGNPTSSYVWRNIIPHVAPTHRCIAPDLIGMGKSDKPDLGYFFDDHVRFMDAFIEALGLEEVVLVIHDWGSALGFHWAKRNPERVKGIAFMEFIRPIPTWDEWPEFARETFQAFRTTDVGRKLIIDQNVFIEGTLPMGVVRPLTEVEMDHY

SEQ ID NO: 372 - protein, 107 aa, Synthetic construct
EPFLNPVDREPLWRFPNELPIAGEPANIVALVEEYMDWLHQSPVPKLLFWGTPGVLIPPAEAARLAKSLPNCKAVDIGPGLNLLQEDNPDLIGSEIARWLSTLEISG

SEQ ID NO: 373 - protein, 190 aa, Synthetic construct
MAEIGTGFPFDPHYVEVLGERMHYVDVGPRDGTPVLFLHGNPTSSYVWRNIIPHVAPTHRCIAPDLIGMGKSDKPDLGYFFDDHVRFMDAFIEALGLEEVVLVIHDWGSALGFHWAKRNPERVKGIAFMEFIRPIPTWDEWPEFARETFQAFRTTDVGRKLIIDQNVFIEGTLPMGVVRPLTEVEMDHYR

SEQ ID NO: 374 - protein, 106 aa, Synthetic construct
PFLNPVDREPLWRFPNELPIAGEPANIVALVEEYMDWLHQSPVPKLLFWGTPGVLIPPAEAARLAKSLPNCKAVDIGPGLNLLQEDNPDLIGSEIARWLSTLEISG

SEQ ID NO: 375 - protein, 191 aa, Synthetic construct
MAEIGTGFPFDPHYVEVLGERMHYVDVGPRDGTPVLFLHGNPTSSYVWRNIIPHVAPTHRCIAPDLIGMGKSDKPDLGYFFDDHVRFMDAFIEALGLEEVVLVIHDWGSALGFHWAKRNPERVKGIAFMEFIRPIPTWDEWPEFARETFQAFRTTDVGRKLIIDQNVFIEGTLPMGVVRPLTEVEMDHYRE

SEQ ID NO: 376 - protein, 105 aa, Synthetic construct
FLNPVDREPLWRFPNELPIAGEPANIVALVEEYMDWLHQSPVPKLLFWGTPGVLIPPAEAARLAKSLPNCKAVDIGPGLNLLQEDNPDLIGSEIARWLSTLEISG

SEQ ID NO: 377 - protein, 192 aa, Synthetic construct
MAEIGTGFPFDPHYVEVLGERMHYVDVGPRDGTPVLFLHGNPTSSYVWRNIIPHVAPTHRCIAPDLIGMGKSDKPDLGYFFDDHVRFMDAFIEALGLEEVVLVIHDWGSALGFHWAKRNPERVKGIAFMEFIRPIPTWDEWPEFARETFQAFRTTDVGRKLIIDQNVFIEGTLPMGVVRPLTEVEMDHYREP

SEQ ID NO: 378 - protein, 104 aa, Synthetic construct
LNPVDREPLWRFPNELPIAGEPANIVALVEEYMDWLHQSPVPKLLFWGTPGVLIPPAEAARLAKSLPNCKAVDIGPGLNLLQEDNPDLIGSEIARWLSTLEISG

SEQ ID NO: 379 - protein, 193 aa, Synthetic construct
MAEIGTGFPFDPHYVEVLGERMHYVDVGPRDGTPVLFLHGNPTSSYVWRNIIPHVAPTHRCIAPDLIGMGKSDKPDLGYFFDDHVRFMDAFIEALGLEEVVLVIHDWGSALGFHWAKRNPERVKGIAFMEFIRPIPTWDEWPEFARETFQAFRTTDVGRKLIIDQNVFIEGTLPMGVVRPLTEVEMDHYREPF

SEQ ID NO: 380 - protein, 103 aa, Synthetic construct
NPVDREPLWRFPNELPIAGEPANIVALVEEYMDWLHQSPVPKLLFWGTPGVLIPPAEAARLAKSLPNCKAVDIGPGLNLLQEDNPDLIGSEIARWLSTLEISG

SEQ ID NO: 381 - protein, 194 aa, Synthetic construct
MAEIGTGFPFDPHYVEVLGERMHYVDVGPRDGTPVLFLHGNPTSSYVWRNIIPHVAPTHRCIAPDLIGMGKSDKPDLGYFFDDHVRFMDAFIEALGLEEVVLVIHDWGSALGFHWAKRNPERVKGIAFMEFIRPIPTWDEWPEFARETFQAFRTTDVGRKLIIDQNVFIEGTLPMGVVRPLTEVEMDHYREPFL

SEQ ID NO: 382 - protein, 102 aa, Synthetic construct
PVDREPLWRFPNELPIAGEPANIVALVEEYMDWLHQSPVPKLLFWGTPGVLIPPAEAARLAKSLPNCKAVDIGPGLNLLQEDNPDLIGSEIARWLSTLEISG

SEQ ID NO: 383 - protein, 195 aa, Synthetic construct
MAEIGTGFPFDPHYVEVLGERMHYVDVGPRDGTPVLFLHGNPTSSYVWRNIIPHVAPTHRCIAPDLIGMGKSDKPDLGYFFDDHVRFMDAFIEALGLEEVVLVIHDWGSALGFHWAKRNPERVKGIAFMEFIRPIPTWDEWPEFARETFQAFRTTDVGRKLIIDQNVFIEGTLPMGVVRPLTEVEMDHYREPFLN

SEQ ID NO: 384 - protein, 101 aa, Synthetic construct
VDREPLWRFPNELPIAGEPANIVALVEEYMDWLHQSPVPKLLFWGTPGVLIPPAEAARLAKSLPNCKAVDIGPGLNLLQEDNPDLIGSEIARWLSTLEISG

SEQ ID NO: 385 - protein, 196 aa, Synthetic construct
MAEIGTGFPFDPHYVEVLGERMHYVDVGPRDGTPVLFLHGNPTSSYVWRNIIPHVAPTHRCIAPDLIGMGKSDKPDLGYFFDDHVRFMDAFIEALGLEEVVLVIHDWGSALGFHWAKRNPERVKGIAFMEFIRPIPTWDEWPEFARETFQAFRTTDVGRKLIIDQNVFIEGTLPMGVVRPLTEVEMDHYREPFLNP

SEQ ID NO: 386 - protein, 100 aa, Synthetic construct
DREPLWRFPNELPIAGEPANIVALVEEYMDWLHQSPVPKLLFWGTPGVLIPPAEAARLAKSLPNCKAVDIGPGLNLLQEDNPDLIGSEIARWLSTLEISG

SEQ ID NO: 387 - protein, 197 aa, Synthetic construct
MAEIGTGFPFDPHYVEVLGERMHYVDVGPRDGTPVLFLHGNPTSSYVWRNIIPHVAPTHRCIAPDLIGMGKSDKPDLGYFFDDHVRFMDAFIEALGLEEVVLVIHDWGSALGFHWAKRNPERVKGIAFMEFIRPIPTWDEWPEFARETFQAFRTTDVGRKLIIDQNVFIEGTLPMGVVRPLTEVEMDHYREPFLNPV

SEQ ID NO: 388 - protein, 99 aa, Synthetic construct
REPLWRFPNELPIAGEPANIVALVEEYMDWLHQSPVPKLLFWGTPGVLIPPAEAARLAKSLPNCKAVDIGPGLNLLQEDNPDLIGSEIARWLSTLEISG

SEQ ID NO: 389 - protein, 198 aa, Synthetic construct
MAEIGTGFPFDPHYVEVLGERMHYVDVGPRDGTPVLFLHGNPTSSYVWRNIIPHVAPTHRCIAPDLIGMGKSDKPDLGYFFDDHVRFMDAFIEALGLEEVVLVIHDWGSALGFHWAKRNPERVKGIAFMEFIRPIPTWDEWPEFARETFQAFRTTDVGRKLIIDQNVFIEGTLPMGVVRPLTEVEMDHYREPFLNPVD

SEQ ID NO: 390 - protein, 98 aa, Synthetic construct
EPLWRFPNELPIAGEPANIVALVEEYMDWLHQSPVPKLLFWGTPGVLIPPAEAARLAKSLPNCKAVDIGPGLNLLQEDNPDLIGSEIARWLSTLEISG

SEQ ID NO: 391 - protein, 199 aa, Synthetic construct
MAEIGTGFPFDPHYVEVLGERMHYVDVGPRDGTPVLFLHGNPTSSYVWRNIIPHVAPTHRCIAPDLIGMGKSDKPDLGYFFDDHVRFMDAFIEALGLEEVVLVIHDWGSALGFHWAKRNPERVKGIAFMEFIRPIPTWDEWPEFARETFQAFRTTDVGRKLIIDQNVFIEGTLPMGVVRPLTEVEMDHYREPFLNPVDR

SEQ ID NO: 392 - protein, 97 aa, Synthetic construct
PLWRFPNELPIAGEPANIVALVEEYMDWLHQSPVPKLLFWGTPGVLIPPAEAARLAKSLPNCKAVDIGPGLNLLQEDNPDLIGSEIARWLSTLEISG

SEQ ID NO: 393 - protein, 200 aa, Synthetic construct
MAEIGTGFPFDPHYVEVLGERMHYVDVGPRDGTPVLFLHGNPTSSYVWRNIIPHVAPTHRCIAPDLIGMGKSDKPDLGYFFDDHVRFMDAFIEALGLEEVVLVIHDWGSALGFHWAKRNPERVKGIAFMEFIRPIPTWDEWPEFARETFQAFRTTDVGRKLIIDQNVFIEGTLPMGVVRPLTEVEMDHYREPFLNPVDRE

SEQ ID NO: 394 - protein, 96 aa, Synthetic construct
LWRFPNELPIAGEPANIVALVEEYMDWLHQSPVPKLLFWGTPGVLIPPAEAARLAKSLPNCKAVDIGPGLNLLQEDNPDLIGSEIARWLSTLEISG

SEQ ID NO: 395 - protein, 201 aa, Synthetic construct
MAEIGTGFPFDPHYVEVLGERMHYVDVGPRDGTPVLFLHGNPTSSYVWRNIIPHVAPTHRCIAPDLIGMGKSDKPDLGYFFDDHVRFMDAFIEALGLEEVVLVIHDWGSALGFHWAKRNPERVKGIAFMEFIRPIPTWDEWPEFARETFQAFRTTDVGRKLIIDQNVFIEGTLPMGVVRPLTEVEMDHYREPFLNPVDREP

SEQ ID NO: 396 - protein, 95 aa, Synthetic construct
WRFPNELPIAGEPANIVALVEEYMDWLHQSPVPKLLFWGTPGVLIPPAEAARLAKSLPNCKAVDIGPGLNLLQEDNPDLIGSEIARWLSTLEISG

SEQ ID NO: 397 - protein, 202 aa, Synthetic construct
MAEIGTGFPFDPHYVEVLGERMHYVDVGPRDGTPVLFLHGNPTSSYVWRNIIPHVAPTHRCIAPDLIGMGKSDKPDLGYFFDDHVRFMDAFIEALGLEEVVLVIHDWGSALGFHWAKRNPERVKGIAFMEFIRPIPTWDEWPEFARETFQAFRTTDVGRKLIIDQNVFIEGTLPMGVVRPLTEVEMDHYREPFLNPVDREPL

SEQ ID NO: 398 - protein, 94 aa, Synthetic construct
RFPNELPIAGEPANIVALVEEYMDWLHQSPVPKLLFWGTPGVLIPPAEAARLAKSLPNCKAVDIGPGLNLLQEDNPDLIGSEIARWLSTLEISG

SEQ ID NO: 399 - protein, 203 aa, Synthetic construct
MAEIGTGFPFDPHYVEVLGERMHYVDVGPRDGTPVLFLHGNPTSSYVWRNIIPHVAPTHRCIAPDLIGMGKSDKPDLGYFFDDHVRFMDAFIEALGLEEVVLVIHDWGSALGFHWAKRNPERVKGIAFMEFIRPIPTWDEWPEFARETFQAFRTTDVGRKLIIDQNVFIEGTLPMGVVRPLTEVEMDHYREPFLNPVDREPLW

SEQ ID NO: 400 - protein, 93 aa, Synthetic construct
FPNELPIAGEPANIVALVEEYMDWLHQSPVPKLLFWGTPGVLIPPAEAARLAKSLPNCKAVDIGPGLNLLQEDNPDLIGSEIARWLSTLEISG

SEQ ID NO: 401 - protein, 204 aa, Synthetic construct
MAEIGTGFPFDPHYVEVLGERMHYVDVGPRDGTPVLFLHGNPTSSYVWRNIIPHVAPTHRCIAPDLIGMGKSDKPDLGYFFDDHVRFMDAFIEALGLEEVVLVIHDWGSALGFHWAKRNPERVKGIAFMEFIRPIPTWDEWPEFARETFQAFRTTDVGRKLIIDQNVFIEGTLPMGVVRPLTEVEMDHYREPFLNPVDREPLWR

SEQ ID NO: 402 - protein, 92 aa, Synthetic construct
PNELPIAGEPANIVALVEEYMDWLHQSPVPKLLFWGTPGVLIPPAEAARLAKSLPNCKAVDIGPGLNLLQEDNPDLIGSEIARWLSTLEISG

SEQ ID NO: 403 - protein, 205 aa, Synthetic construct
MAEIGTGFPFDPHYVEVLGERMHYVDVGPRDGTPVLFLHGNPTSSYVWRNIIPHVAPTHRCIAPDLIGMGKSDKPDLGYFFDDHVRFMDAFIEALGLEEVVLVIHDWGSALGFHWAKRNPERVKGIAFMEFIRPIPTWDEWPEFARETFQAFRTTDVGRKLIIDQNVFIEGTLPMGVVRPLTEVEMDHYREPFLNPVDREPLWRF

SEQ ID NO: 404 - protein, 91 aa, Synthetic construct
NELPIAGEPANIVALVEEYMDWLHQSPVPKLLFWGTPGVLIPPAEAARLAKSLPNCKAVDIGPGLNLLQEDNPDLIGSEIARWLSTLEISG

SEQ ID NO: 405 - protein, 206 aa, Synthetic construct
MAEIGTGFPFDPHYVEVLGERMHYVDVGPRDGTPVLFLHGNPTSSYVWRNIIPHVAPTHRCIAPDLIGMGKSDKPDLGYFFDDHVRFMDAFIEALGLEEVVLVIHDWGSALGFHWAKRNPERVKGIAFMEFIRPIPTWDEWPEFARETFQAFRTTDVGRKLIIDQNVFIEGTLPMGVVRPLTEVEMDHYREPFLNPVDREPLWRFP

SEQ ID NO: 406 - protein, 90 aa, Synthetic construct
ELPIAGEPANIVALVEEYMDWLHQSPVPKLLFWGTPGVLIPPAEAARLAKSLPNCKAVDIGPGLNLLQEDNPDLIGSEIARWLSTLEISG

SEQ ID NO: 407 - protein, 207 aa, Synthetic construct
MAEIGTGFPFDPHYVEVLGERMHYVDVGPRDGTPVLFLHGNPTSSYVWRNIIPHVAPTHRCIAPDLIGMGKSDKPDLGYFFDDHVRFMDAFIEALGLEEVVLVIHDWGSALGFHWAKRNPERVKGIAFMEFIRPIPTWDEWPEFARETFQAFRTTDVGRKLIIDQNVFIEGTLPMGVVRPLTEVEMDHYREPFLNPVDREPLWRFPN

SEQ ID NO: 408 - protein, 89 aa, Synthetic construct
LPIAGEPANIVALVEEYMDWLHQSPVPKLLFWGTPGVLIPPAEAARLAKSLPNCKAVDIGPGLNLLQEDNPDLIGSEIARWLSTLEISG

SEQ ID NO: 409 - protein, 208 aa, Synthetic construct
MAEIGTGFPFDPHYVEVLGERMHYVDVGPRDGTPVLFLHGNPTSSYVWRNIIPHVAPTHRCIAPDLIGMGKSDKPDLGYFFDDHVRFMDAFIEALGLEEVVLVIHDWGSALGFHWAKRNPERVKGIAFMEFIRPIPTWDEWPEFARETFQAFRTTDVGRKLIIDQNVFIEGTLPMGVVRPLTEVEMDHYREPFLNPVDREPLWRFPNE

SEQ ID NO: 410 - protein, 88 aa, Synthetic construct
PIAGEPANIVALVEEYMDWLHQSPVPKLLFWGTPGVLIPPAEAARLAKSLPNCKAVDIGPGLNLLQEDNPDLIGSEIARWLSTLEISG

SEQ ID NO: 411 - protein, 209 aa, Synthetic construct
MAEIGTGFPFDPHYVEVLGERMHYVDVGPRDGTPVLFLHGNPTSSYVWRNIIPHVAPTHRCIAPDLIGMGKSDKPDLGYFFDDHVRFMDAFIEALGLEEVVLVIHDWGSALGFHWAKRNPERVKGIAFMEFIRPIPTWDEWPEFARETFQAFRTTDVGRKLIIDQNVFIEGTLPMGVVRPLTEVEMDHYREPFLNPVDREPLWRFPNEL

SEQ ID NO: 412 - protein, 87 aa, Synthetic construct
IAGEPANIVALVEEYMDWLHQSPVPKLLFWGTPGVLIPPAEAARLAKSLPNCKAVDIGPGLNLLQEDNPDLIGSEIARWLSTLEISG

SEQ ID NO: 413 - protein, 210 aa, Synthetic construct
MAEIGTGFPFDPHYVEVLGERMHYVDVGPRDGTPVLFLHGNPTSSYVWRNIIPHVAPTHRCIAPDLIGMGKSDKPDLGYFFDDHVRFMDAFIEALGLEEVVLVIHDWGSALGFHWAKRNPERVKGIAFMEFIRPIPTWDEWPEFARETFQAFRTTDVGRKLIIDQNVFIEGTLPMGVVRPLTEVEMDHYREPFLNPVDREPLWRFPNELP

SEQ ID NO: 414 - protein, 86 aa, Synthetic construct
AGEPANIVALVEEYMDWLHQSPVPKLLFWGTPGVLIPPAEAARLAKSLPNCKAVDIGPGLNLLQEDNPDLIGSEIARWLSTLEISG

SEQ ID NO: 415 - protein, 211 aa, Synthetic construct
MAEIGTGFPFDPHYVEVLGERMHYVDVGPRDGTPVLFLHGNPTSSYVWRNIIPHVAPTHRCIAPDLIGMGKSDKPDLGYFFDDHVRFMDAFIEALGLEEVVLVIHDWGSALGFHWAKRNPERVKGIAFMEFIRPIPTWDEWPEFARETFQAFRTTDVGRKLIIDQNVFIEGTLPMGVVRPLTEVEMDHYREPFLNPVDREPLWRFPNELPI

SEQ ID NO: 416 - protein, 85 aa, Synthetic construct
GEPANIVALVEEYMDWLHQSPVPKLLFWGTPGVLIPPAEAARLAKSLPNCKAVDIGPGLNLLQEDNPDLIGSEIARWLSTLEISG

SEQ ID NO: 417 - protein, 212 aa, Synthetic construct
MAEIGTGFPFDPHYVEVLGERMHYVDVGPRDGTPVLFLHGNPTSSYVWRNIIPHVAPTHRCIAPDLIGMGKSDKPDLGYFFDDHVRFMDAFIEALGLEEVVLVIHDWGSALGFHWAKRNPERVKGIAFMEFIRPIPTWDEWPEFARETFQAFRTTDVGRKLIIDQNVFIEGTLPMGVVRPLTEVEMDHYREPFLNPVDREPLWRFPNELPIA

SEQ ID NO: 418 - protein, 84 aa, Synthetic construct
EPANIVALVEEYMDWLHQSPVPKLLFWGTPGVLIPPAEAARLAKSLPNCKAVDIGPGLNLLQEDNPDLIGSEIARWLSTLEISG

SEQ ID NO: 419 - protein, 213 aa, Synthetic construct
MAEIGTGFPFDPHYVEVLGERMHYVDVGPRDGTPVLFLHGNPTSSYVWRNIIPHVAPTHRCIAPDLIGMGKSDKPDLGYFFDDHVRFMDAFIEALGLEEVVLVIHDWGSALGFHWAKRNPERVKGIAFMEFIRPIPTWDEWPEFARETFQAFRTTDVGRKLIIDQNVFIEGTLPMGVVRPLTEVEMDHYREPFLNPVDREPLWRFPNELPIAG

SEQ ID NO: 420 - protein, 83 aa, Synthetic construct
PANIVALVEEYMDWLHQSPVPKLLFWGTPGVLIPPAEAARLAKSLPNCKAVDIGPGLNLLQEDNPDLIGSEIARWLSTLEISG

SEQ ID NO: 421 - protein, 214 aa, Synthetic construct
MAEIGTGFPFDPHYVEVLGERMHYVDVGPRDGTPVLFLHGNPTSSYVWRNIIPHVAPTHRCIAPDLIGMGKSDKPDLGYFFDDHVRFMDAFIEALGLEEVVLVIHDWGSALGFHWAKRNPERVKGIAFMEFIRPIPTWDEWPEFARETFQAFRTTDVGRKLIIDQNVFIEGTLPMGVVRPLTEVEMDHYREPFLNPVDREPLWRFPNELPIAGE

SEQ ID NO: 422 - protein, 82 aa, Synthetic construct
ANIVALVEEYMDWLHQSPVPKLLFWGTPGVLIPPAEAARLAKSLPNCKAVDIGPGLNLLQEDNPDLIGSEIARWLSTLEISG

SEQ ID NO: 423 - protein, 215 aa, Synthetic construct
MAEIGTGFPFDPHYVEVLGERMHYVDVGPRDGTPVLFLHGNPTSSYVWRNIIPHVAPTHRCIAPDLIGMGKSDKPDLGYFFDDHVRFMDAFIEALGLEEVVLVIHDWGSALGFHWAKRNPERVKGIAFMEFIRPIPTWDEWPEFARETFQAFRTTDVGRKLIIDQNVFIEGTLPMGVVRPLTEVEMDHYREPFLNPVDREPLWRFPNELPIAGEP

SEQ ID NO: 424 - protein, 81 aa, Synthetic construct
NIVALVEEYMDWLHQSPVPKLLFWGTPGVLIPPAEAARLAKSLPNCKAVDIGPGLNLLQEDNPDLIGSEIARWLSTLEISG

SEQ ID NO: 425 - protein, 216 aa, Synthetic construct
MAEIGTGFPFDPHYVEVLGERMHYVDVGPRDGTPVLFLHGNPTSSYVWRNIIPHVAPTHRCIAPDLIGMGKSDKPDLGYFFDDHVRFMDAFIEALGLEEVVLVIHDWGSALGFHWAKRNPERVKGIAFMEFIRPIPTWDEWPEFARETFQAFRTTDVGRKLIIDQNVFIEGTLPMGVVRPLTEVEMDHYREPFLNPVDREPLWRFPNELPIAGEPA

SEQ ID NO: 426 - protein, 80 aa, Synthetic construct
IVALVEEYMDWLHQSPVPKLLFWGTPGVLIPPAEAARLAKSLPNCKAVDIGPGLNLLQEDNPDLIGSEIARWLSTLEISG

SEQ ID NO: 427 - protein, 217 aa, Synthetic construct
MAEIGTGFPFDPHYVEVLGERMHYVDVGPRDGTPVLFLHGNPTSSYVWRNIIPHVAPTHRCIAPDLIGMGKSDKPDLGYFFDDHVRFMDAFIEALGLEEVVLVIHDWGSALGFHWAKRNPERVKGIAFMEFIRPIPTWDEWPEFARETFQAFRTTDVGRKLIIDQNVFIEGTLPMGVVRPLTEVEMDHYREPFLNPVDREPLWRFPNELPIAGEPAN

SEQ ID NO: 428 - protein, 79 aa, Synthetic construct
VALVEEYMDWLHQSPVPKLLFWGTPGVLIPPAEAARLAKSLPNCKAVDIGPGLNLLQEDNPDLIGSEIARWLSTLEISG

SEQ ID NO: 429 - protein, 218 aa, Synthetic construct
MAEIGTGFPFDPHYVEVLGERMHYVDVGPRDGTPVLFLHGNPTSSYVWRNIIPHVAPTHRCIAPDLIGMGKSDKPDLGYFFDDHVRFMDAFIEALGLEEVVLVIHDWGSALGFHWAKRNPERVKGIAFMEFIRPIPTWDEWPEFARETFQAFRTTDVGRKLIIDQNVFIEGTLPMGVVRPLTEVEMDHYREPFLNPVDREPLWRFPNELPIAGEPANI

SEQ ID NO: 430 - protein, 78 aa, Synthetic construct
ALVEEYMDWLHQSPVPKLLFWGTPGVLIPPAEAARLAKSLPNCKAVDIGPGLNLLQEDNPDLIGSEIARWLSTLEISG

SEQ ID NO: 431 - protein, 219 aa, Synthetic construct
MAEIGTGFPFDPHYVEVLGERMHYVDVGPRDGTPVLFLHGNPTSSYVWRNIIPHVAPTHRCIAPDLIGMGKSDKPDLGYFFDDHVRFMDAFIEALGLEEVVLVIHDWGSALGFHWAKRNPERVKGIAFMEFIRPIPTWDEWPEFARETFQAFRTTDVGRKLIIDQNVFIEGTLPMGVVRPLTEVEMDHYREPFLNPVDREPLWRFPNELPIAGEPANIV

SEQ ID NO: 432 - protein, 77 aa, Synthetic construct
LVEEYMDWLHQSPVPKLLFWGTPGVLIPPAEAARLAKSLPNCKAVDIGPGLNLLQEDNPDLIGSEIARWLSTLEISG

SEQ ID NO: 433 - protein, 220 aa, Synthetic construct
MAEIGTGFPFDPHYVEVLGERMHYVDVGPRDGTPVLFLHGNPTSSYVWRNIIPHVAPTHRCIAPDLIGMGKSDKPDLGYFFDDHVRFMDAFIEALGLEEVVLVIHDWGSALGFHWAKRNPERVKGIAFMEFIRPIPTWDEWPEFARETFQAFRTTDVGRKLIIDQNVFIEGTLPMGVVRPLTEVEMDHYREPFLNPVDREPLWRFPNELPIAGEPANIVA

SEQ ID NO: 434 - protein, 76 aa, Synthetic construct
VEEYMDWLHQSPVPKLLFWGTPGVLIPPAEAARLAKSLPNCKAVDIGPGLNLLQEDNPDLIGSEIARWLSTLEISG

SEQ ID NO: 435 - protein, 221 aa, Synthetic construct
MAEIGTGFPFDPHYVEVLGERMHYVDVGPRDGTPVLFLHGNPTSSYVWRNIIPHVAPTHRCIAPDLIGMGKSDKPDLGYFFDDHVRFMDAFIEALGLEEVVLVIHDWGSALGFHWAKRNPERVKGIAFMEFIRPIPTWDEWPEFARETFQAFRTTDVGRKLIIDQNVFIEGTLPMGVVRPLTEVEMDHYREPFLNPVDREPLWRFPNELPIAGEPANIVAL

SEQ ID NO: 436 - protein, 75 aa, Synthetic construct
EEYMDWLHQSPVPKLLFWGTPGVLIPPAEAARLAKSLPNCKAVDIGPGLNLLQEDNPDLIGSEIARWLSTLEISG

SEQ ID NO: 437 - protein, 222 aa, Synthetic construct
MAEIGTGFPFDPHYVEVLGERMHYVDVGPRDGTPVLFLHGNPTSSYVWRNIIPHVAPTHRCIAPDLIGMGKSDKPDLGYFFDDHVRFMDAFIEALGLEEVVLVIHDWGSALGFHWAKRNPERVKGIAFMEFIRPIPTWDEWPEFARETFQAFRTTDVGRKLIIDQNVFIEGTLPMGVVRPLTEVEMDHYREPFLNPVDREPLWRFPNELPIAGEPANIVALV

SEQ ID NO: 438 - protein, 74 aa, Synthetic construct
EYMDWLHQSPVPKLLFWGTPGVLIPPAEAARLAKSLPNCKAVDIGPGLNLLQEDNPDLIGSEIARWLSTLEISG

SEQ ID NO: 439 - protein, 223 aa, Synthetic construct
MAEIGTGFPFDPHYVEVLGERMHYVDVGPRDGTPVLFLHGNPTSSYVWRNIIPHVAPTHRCIAPDLIGMGKSDKPDLGYFFDDHVRFMDAFIEALGLEEVVLVIHDWGSALGFHWAKRNPERVKGIAFMEFIRPIPTWDEWPEFARETFQAFRTTDVGRKLIIDQNVFIEGTLPMGVVRPLTEVEMDHYREPFLNPVDREPLWRFPNELPIAGEPANIVALVE

SEQ ID NO: 440 - protein, 73 aa, Synthetic construct
YMDWLHQSPVPKLLFWGTPGVLIPPAEAARLAKSLPNCKAVDIGPGLNLLQEDNPDLIGSEIARWLSTLEISG

SEQ ID NO: 441 - protein, 224 aa, Synthetic construct
MAEIGTGFPFDPHYVEVLGERMHYVDVGPRDGTPVLFLHGNPTSSYVWRNIIPHVAPTHRCIAPDLIGMGKSDKPDLGYFFDDHVRFMDAFIEALGLEEVVLVIHDWGSALGFHWAKRNPERVKGIAFMEFIRPIPTWDEWPEFARETFQAFRTTDVGRKLIIDQNVFIEGTLPMGVVRPLTEVEMDHYREPFLNPVDREPLWRFPNELPIAGEPANIVALVEE

SEQ ID NO: 442 - protein, 72 aa, Synthetic construct
MDWLHQSPVPKLLFWGTPGVLIPPAEAARLAKSLPNCKAVDIGPGLNLLQEDNPDLIGSEIARWLSTLEISG

SEQ ID NO: 443 - protein, 225 aa, Synthetic construct
MAEIGTGFPFDPHYVEVLGERMHYVDVGPRDGTPVLFLHGNPTSSYVWRNIIPHVAPTHRCIAPDLIGMGKSDKPDLGYFFDDHVRFMDAFIEALGLEEVVLVIHDWGSALGFHWAKRNPERVKGIAFMEFIRPIPTWDEWPEFARETFQAFRTTDVGRKLIIDQNVFIEGTLPMGVVRPLTEVEMDHYREPFLNPVDREPLWRFPNELPIAGEPANIVALVEEY

SEQ ID NO: 444 - protein, 71 aa, Synthetic construct
DWLHQSPVPKLLFWGTPGVLIPPAEAARLAKSLPNCKAVDIGPGLNLLQEDNPDLIGSEIARWLSTLEISG

SEQ ID NO: 445 - protein, 226 aa, Synthetic construct
MAEIGTGFPFDPHYVEVLGERMHYVDVGPRDGTPVLFLHGNPTSSYVWRNIIPHVAPTHRCIAPDLIGMGKSDKPDLGYFFDDHVRFMDAFIEALGLEEVVLVIHDWGSALGFHWAKRNPERVKGIAFMEFIRPIPTWDEWPEFARETFQAFRTTDVGRKLIIDQNVFIEGTLPMGVVRPLTEVEMDHYREPFLNPVDREPLWRFPNELPIAGEPANIVALVEEYM

SEQ ID NO: 446 - protein, 70 aa, Synthetic construct
WLHQSPVPKLLFWGTPGVLIPPAEAARLAKSLPNCKAVDIGPGLNLLQEDNPDLIGSEIARWLSTLEISG

SEQ ID NO: 447 - protein, 227 aa, Synthetic construct
MAEIGTGFPFDPHYVEVLGERMHYVDVGPRDGTPVLFLHGNPTSSYVWRNIIPHVAPTHRCIAPDLIGMGKSDKPDLGYFFDDHVRFMDAFIEALGLEEVVLVIHDWGSALGFHWAKRNPERVKGIAFMEFIRPIPTWDEWPEFARETFQAFRTTDVGRKLIIDQNVFIEGTLPMGVVRPLTEVEMDHYREPFLNPVDREPLWRFPNELPIAGEPANIVALVEEYMD

SEQ ID NO: 448 - protein, 69 aa, Synthetic construct
LHQSPVPKLLFWGTPGVLIPPAEAARLAKSLPNCKAVDIGPGLNLLQEDNPDLIGSEIARWLSTLEISG

SEQ ID NO: 449 - protein, 228 aa, Synthetic construct
MAEIGTGFPFDPHYVEVLGERMHYVDVGPRDGTPVLFLHGNPTSSYVWRNIIPHVAPTHRCIAPDLIGMGKSDKPDLGYFFDDHVRFMDAFIEALGLEEVVLVIHDWGSALGFHWAKRNPERVKGIAFMEFIRPIPTWDEWPEFARETFQAFRTTDVGRKLIIDQNVFIEGTLPMGVVRPLTEVEMDHYREPFLNPVDREPLWRFPNELPIAGEPANIVALVEEYMDW

SEQ ID NO: 450 - protein, 68 aa, Synthetic construct
HQSPVPKLLFWGTPGVLIPPAEAARLAKSLPNCKAVDIGPGLNLLQEDNPDLIGSEIARWLSTLEISG

SEQ ID NO: 451 - protein, 229 aa, Synthetic construct
MAEIGTGFPFDPHYVEVLGERMHYVDVGPRDGTPVLFLHGNPTSSYVWRNIIPHVAPTHRCIAPDLIGMGKSDKPDLGYFFDDHVRFMDAFIEALGLEEVVLVIHDWGSALGFHWAKRNPERVKGIAFMEFIRPIPTWDEWPEFARETFQAFRTTDVGRKLIIDQNVFIEGTLPMGVVRPLTEVEMDHYREPFLNPVDREPLWRFPNELPIAGEPANIVALVEEYMDWL

SEQ ID NO: 452 - protein, 67 aa, Synthetic construct
QSPVPKLLFWGTPGVLIPPAEAARLAKSLPNCKAVDIGPGLNLLQEDNPDLIGSEIARWLSTLEISG

SEQ ID NO: 453 - protein, 230 aa, Synthetic construct
MAEIGTGFPFDPHYVEVLGERMHYVDVGPRDGTPVLFLHGNPTSSYVWRNIIPHVAPTHRCIAPDLIGMGKSDKPDLGYFFDDHVRFMDAFIEALGLEEVVLVIHDWGSALGFHWAKRNPERVKGIAFMEFIRPIPTWDEWPEFARETFQAFRTTDVGRKLIIDQNVFIEGTLPMGVVRPLTEVEMDHYREPFLNPVDREPLWRFPNELPIAGEPANIVALVEEYMDWLH

SEQ ID NO: 454 - protein, 66 aa, Synthetic construct
SPVPKLLFWGTPGVLIPPAEAARLAKSLPNCKAVDIGPGLNLLQEDNPDLIGSEIARWLSTLEISG

SEQ ID NO: 455 - protein, 231 aa, Synthetic construct
MAEIGTGFPFDPHYVEVLGERMHYVDVGPRDGTPVLFLHGNPTSSYVWRNIIPHVAPTHRCIAPDLIGMGKSDKPDLGYFFDDHVRFMDAFIEALGLEEVVLVIHDWGSALGFHWAKRNPERVKGIAFMEFIRPIPTWDEWPEFARETFQAFRTTDVGRKLIIDQNVFIEGTLPMGVVRPLTEVEMDHYREPFLNPVDREPLWRFPNELPIAGEPANIVALVEEYMDWLHQ

SEQ ID NO: 456 - protein, 65 aa, Synthetic construct
PVPKLLFWGTPGVLIPPAEAARLAKSLPNCKAVDIGPGLNLLQEDNPDLIGSEIARWLSTLEISG

SEQ ID NO: 457 - protein, 232 aa, Synthetic construct
MAEIGTGFPFDPHYVEVLGERMHYVDVGPRDGTPVLFLHGNPTSSYVWRNIIPHVAPTHRCIAPDLIGMGKSDKPDLGYFFDDHVRFMDAFIEALGLEEVVLVIHDWGSALGFHWAKRNPERVKGIAFMEFIRPIPTWDEWPEFARETFQAFRTTDVGRKLIIDQNVFIEGTLPMGVVRPLTEVEMDHYREPFLNPVDREPLWRFPNELPIAGEPANIVALVEEYMDWLHQS

SEQ ID NO: 458 - protein, 64 aa, Synthetic construct
VPKLLFWGTPGVLIPPAEAARLAKSLPNCKAVDIGPGLNLLQEDNPDLIGSEIARWLSTLEISG

SEQ ID NO: 459 - protein, 233 aa, Synthetic construct
MAEIGTGFPFDPHYVEVLGERMHYVDVGPRDGTPVLFLHGNPTSSYVWRNIIPHVAPTHRCIAPDLIGMGKSDKPDLGYFFDDHVRFMDAFIEALGLEEVVLVIHDWGSALGFHWAKRNPERVKGIAFMEFIRPIPTWDEWPEFARETFQAFRTTDVGRKLIIDQNVFIEGTLPMGVVRPLTEVEMDHYREPFLNPVDREPLWRFPNELPIAGEPANIVALVEEYMDWLHQSP

SEQ ID NO: 460 - protein, 63 aa, Synthetic construct
PKLLFWGTPGVLIPPAEAARLAKSLPNCKAVDIGPGLNLLQEDNPDLIGSEIARWLSTLEISG

SEQ ID NO: 461 - protein, 234 aa, Synthetic construct
MAEIGTGFPFDPHYVEVLGERMHYVDVGPRDGTPVLFLHGNPTSSYVWRNIIPHVAPTHRCIAPDLIGMGKSDKPDLGYFFDDHVRFMDAFIEALGLEEVVLVIHDWGSALGFHWAKRNPERVKGIAFMEFIRPIPTWDEWPEFARETFQAFRTTDVGRKLIIDQNVFIEGTLPMGVVRPLTEVEMDHYREPFLNPVDREPLWRFPNELPIAGEPANIVALVEEYMDWLHQSPV

SEQ ID NO: 462 - protein, 62 aa, Synthetic construct
KLLFWGTPGVLIPPAEAARLAKSLPNCKAVDIGPGLNLLQEDNPDLIGSEIARWLSTLEISG

SEQ ID NO: 463 - protein, 235 aa, Synthetic construct
MAEIGTGFPFDPHYVEVLGERMHYVDVGPRDGTPVLFLHGNPTSSYVWRNIIPHVAPTHRCIAPDLIGMGKSDKPDLGYFFDDHVRFMDAFIEALGLEEVVLVIHDWGSALGFHWAKRNPERVKGIAFMEFIRPIPTWDEWPEFARETFQAFRTTDVGRKLIIDQNVFIEGTLPMGVVRPLTEVEMDHYREPFLNPVDREPLWRFPNELPIAGEPANIVALVEEYMDWLHQSPVP

SEQ ID NO: 464 - protein, 61 aa, Synthetic construct
LLFWGTPGVLIPPAEAARLAKSLPNCKAVDIGPGLNLLQEDNPDLIGSEIARWLSTLEISG

SEQ ID NO: 465 - protein, 236 aa, Synthetic construct
MAEIGTGFPFDPHYVEVLGERMHYVDVGPRDGTPVLFLHGNPTSSYVWRNIIPHVAPTHRCIAPDLIGMGKSDKPDLGYFFDDHVRFMDAFIEALGLEEVVLVIHDWGSALGFHWAKRNPERVKGIAFMEFIRPIPTWDEWPEFARETFQAFRTTDVGRKLIIDQNVFIEGTLPMGVVRPLTEVEMDHYREPFLNPVDREPLWRFPNELPIAGEPANIVALVEEYMDWLHQSPVPK

SEQ ID NO: 466 - protein, 60 aa, Synthetic construct
LFWGTPGVLIPPAEAARLAKSLPNCKAVDIGPGLNLLQEDNPDLIGSEIARWLSTLEISG

SEQ ID NO: 467 - protein, 237 aa, Synthetic construct
MAEIGTGFPFDPHYVEVLGERMHYVDVGPRDGTPVLFLHGNPTSSYVWRNIIPHVAPTHRCIAPDLIGMGKSDKPDLGYFFDDHVRFMDAFIEALGLEEVVLVIHDWGSALGFHWAKRNPERVKGIAFMEFIRPIPTWDEWPEFARETFQAFRTTDVGRKLIIDQNVFIEGTLPMGVVRPLTEVEMDHYREPFLNPVDREPLWRFPNELPIAGEPANIVALVEEYMDWLHQSPVPKL

SEQ ID NO: 468 - protein, 59 aa, Synthetic construct
FWGTPGVLIPPAEAARLAKSLPNCKAVDIGPGLNLLQEDNPDLIGSEIARWLSTLEISG

SEQ ID NO: 469 - protein, 238 aa, Synthetic construct
MAEIGTGFPFDPHYVEVLGERMHYVDVGPRDGTPVLFLHGNPTSSYVWRNIIPHVAPTHRCIAPDLIGMGKSDKPDLGYFFDDHVRFMDAFIEALGLEEVVLVIHDWGSALGFHWAKRNPERVKGIAFMEFIRPIPTWDEWPEFARETFQAFRTTDVGRKLIIDQNVFIEGTLPMGVVRPLTEVEMDHYREPFLNPVDREPLWRFPNELPIAGEPANIVALVEEYMDWLHQSPVPKLL

SEQ ID NO: 470 - protein, 58 aa, Synthetic construct
WGTPGVLIPPAEAARLAKSLPNCKAVDIGPGLNLLQEDNPDLIGSEIARWLSTLEISG

SEQ ID NO: 471 - protein, 239 aa, Synthetic construct
MAEIGTGFPFDPHYVEVLGERMHYVDVGPRDGTPVLFLHGNPTSSYVWRNIIPHVAPTHRCIAPDLIGMGKSDKPDLGYFFDDHVRFMDAFIEALGLEEVVLVIHDWGSALGFHWAKRNPERVKGIAFMEFIRPIPTWDEWPEFARETFQAFRTTDVGRKLIIDQNVFIEGTLPMGVVRPLTEVEMDHYREPFLNPVDREPLWRFPNELPIAGEPANIVALVEEYMDWLHQSPVPKLLF

SEQ ID NO: 472 - protein, 57 aa, Synthetic construct
GTPGVLIPPAEAARLAKSLPNCKAVDIGPGLNLLQEDNPDLIGSEIARWLSTLEISG

SEQ ID NO: 473 - protein, 240 aa, Synthetic construct
MAEIGTGFPFDPHYVEVLGERMHYVDVGPRDGTPVLFLHGNPTSSYVWRNIIPHVAPTHRCIAPDLIGMGKSDKPDLGYFFDDHVRFMDAFIEALGLEEVVLVIHDWGSALGFHWAKRNPERVKGIAFMEFIRPIPTWDEWPEFARETFQAFRTTDVGRKLIIDQNVFIEGTLPMGVVRPLTEVEMDHYREPFLNPVDREPLWRFPNELPIAGEPANIVALVEEYMDWLHQSPVPKLLFW

SEQ ID NO: 474 - protein, 56 aa, Synthetic construct
TPGVLIPPAEAARLAKSLPNCKAVDIGPGLNLLQEDNPDLIGSEIARWLSTLEISG

SEQ ID NO: 475 - protein, 241 aa, Synthetic construct
MAEIGTGFPFDPHYVEVLGERMHYVDVGPRDGTPVLFLHGNPTSSYVWRNIIPHVAPTHRCIAPDLIGMGKSDKPDLGYFFDDHVRFMDAFIEALGLEEVVLVIHDWGSALGFHWAKRNPERVKGIAFMEFIRPIPTWDEWPEFARETFQAFRTTDVGRKLIIDQNVFIEGTLPMGVVRPLTEVEMDHYREPFLNPVDREPLWRFPNELPIAGEPANIVALVEEYMDWLHQSPVPKLLFWG

SEQ ID NO: 476 - protein, 55 aa, Synthetic construct
PGVLIPPAEAARLAKSLPNCKAVDIGPGLNLLQEDNPDLIGSEIARWLSTLEISG

SEQ ID NO: 477 - protein, 242 aa, Synthetic construct
MAEIGTGFPFDPHYVEVLGERMHYVDVGPRDGTPVLFLHGNPTSSYVWRNIIPHVAPTHRCIAPDLIGMGKSDKPDLGYFFDDHVRFMDAFIEALGLEEVVLVIHDWGSALGFHWAKRNPERVKGIAFMEFIRPIPTWDEWPEFARETFQAFRTTDVGRKLIIDQNVFIEGTLPMGVVRPLTEVEMDHYREPFLNPVDREPLWRFPNELPIAGEPANIVALVEEYMDWLHQSPVPKLLFWGT

SEQ ID NO: 478 - protein, 54 aa, Synthetic construct
GVLIPPAEAARLAKSLPNCKAVDIGPGLNLLQEDNPDLIGSEIARWLSTLEISG

SEQ ID NO: 479 - protein, 243 aa, Synthetic construct
MAEIGTGFPFDPHYVEVLGERMHYVDVGPRDGTPVLFLHGNPTSSYVWRNIIPHVAPTHRCIAPDLIGMGKSDKPDLGYFFDDHVRFMDAFIEALGLEEVVLVIHDWGSALGFHWAKRNPERVKGIAFMEFIRPIPTWDEWPEFARETFQAFRTTDVGRKLIIDQNVFIEGTLPMGVVRPLTEVEMDHYREPFLNPVDREPLWRFPNELPIAGEPANIVALVEEYMDWLHQSPVPKLLFWGTP

SEQ ID NO: 480 - protein, 53 aa, Synthetic construct
VLIPPAEAARLAKSLPNCKAVDIGPGLNLLQEDNPDLIGSEIARWLSTLEISG

SEQ ID NO: 481 - protein, 244 aa, Synthetic construct
MAEIGTGFPFDPHYVEVLGERMHYVDVGPRDGTPVLFLHGNPTSSYVWRNIIPHVAPTHRCIAPDLIGMGKSDKPDLGYFFDDHVRFMDAFIEALGLEEVVLVIHDWGSALGFHWAKRNPERVKGIAFMEFIRPIPTWDEWPEFARETFQAFRTTDVGRKLIIDQNVFIEGTLPMGVVRPLTEVEMDHYREPFLNPVDREPLWRFPNELPIAGEPANIVALVEEYMDWLHQSPVPKLLFWGTPG

SEQ ID NO: 482 - protein, 52 aa, Synthetic construct
LIPPAEAARLAKSLPNCKAVDIGPGLNLLQEDNPDLIGSEIARWLSTLEISG

SEQ ID NO: 483 - protein, 245 aa, Synthetic construct
MAEIGTGFPFDPHYVEVLGERMHYVDVGPRDGTPVLFLHGNPTSSYVWRNIIPHVAPTHRCIAPDLIGMGKSDKPDLGYFFDDHVRFMDAFIEALGLEEVVLVIHDWGSALGFHWAKRNPERVKGIAFMEFIRPIPTWDEWPEFARETFQAFRTTDVGRKLIIDQNVFIEGTLPMGVVRPLTEVEMDHYREPFLNPVDREPLWRFPNELPIAGEPANIVALVEEYMDWLHQSPVPKLLFWGTPGV

SEQ ID NO: 484 - protein, 51 aa, Synthetic construct
IPPAEAARLAKSLPNCKAVDIGPGLNLLQEDNPDLIGSEIARWLSTLEISG

SEQ ID NO: 485 - protein, 246 aa, Synthetic construct
MAEIGTGFPFDPHYVEVLGERMHYVDVGPRDGTPVLFLHGNPTSSYVWRNIIPHVAPTHRCIAPDLIGMGKSDKPDLGYFFDDHVRFMDAFIEALGLEEVVLVIHDWGSALGFHWAKRNPERVKGIAFMEFIRPIPTWDEWPEFARETFQAFRTTDVGRKLIIDQNVFIEGTLPMGVVRPLTEVEMDHYREPFLNPVDREPLWRFPNELPIAGEPANIVALVEEYMDWLHQSPVPKLLFWGTPGVL

SEQ ID NO: 486 - protein, 50 aa, Synthetic construct
PPAEAARLAKSLPNCKAVDIGPGLNLLQEDNPDLIGSEIARWLSTLEISG

SEQ ID NO: 487 - protein, 247 aa, Synthetic construct
MAEIGTGFPFDPHYVEVLGERMHYVDVGPRDGTPVLFLHGNPTSSYVWRNIIPHVAPTHRCIAPDLIGMGKSDKPDLGYFFDDHVRFMDAFIEALGLEEVVLVIHDWGSALGFHWAKRNPERVKGIAFMEFIRPIPTWDEWPEFARETFQAFRTTDVGRKLIIDQNVFIEGTLPMGVVRPLTEVEMDHYREPFLNPVDREPLWRFPNELPIAGEPANIVALVEEYMDWLHQSPVPKLLFWGTPGVLI

SEQ ID NO: 488 - protein, 49 aa, Synthetic construct
PAEAARLAKSLPNCKAVDIGPGLNLLQEDNPDLIGSEIARWLSTLEISG

SEQ ID NO: 489 - protein, 248 aa, Synthetic construct
MAEIGTGFPFDPHYVEVLGERMHYVDVGPRDGTPVLFLHGNPTSSYVWRNIIPHVAPTHRCIAPDLIGMGKSDKPDLGYFFDDHVRFMDAFIEALGLEEVVLVIHDWGSALGFHWAKRNPERVKGIAFMEFIRPIPTWDEWPEFARETFQAFRTTDVGRKLIIDQNVFIEGTLPMGVVRPLTEVEMDHYREPFLNPVDREPLWRFPNELPIAGEPANIVALVEEYMDWLHQSPVPKLLFWGTPGVLIP

SEQ ID NO: 490 - protein, 48 aa, Synthetic construct
AEAARLAKSLPNCKAVDIGPGLNLLQEDNPDLIGSEIARWLSTLEISG

SEQ ID NO: 491 - protein, 249 aa, Synthetic construct
MAEIGTGFPFDPHYVEVLGERMHYVDVGPRDGTPVLFLHGNPTSSYVWRNIIPHVAPTHRCIAPDLIGMGKSDKPDLGYFFDDHVRFMDAFIEALGLEEVVLVIHDWGSALGFHWAKRNPERVKGIAFMEFIRPIPTWDEWPEFARETFQAFRTTDVGRKLIIDQNVFIEGTLPMGVVRPLTEVEMDHYREPFLNPVDREPLWRFPNELPIAGEPANIVALVEEYMDWLHQSPVPKLLFWGTPGVLIPP

SEQ ID NO: 492 - protein, 47 aa, Synthetic construct
EAARLAKSLPNCKAVDIGPGLNLLQEDNPDLIGSEIARWLSTLEISG

SEQ ID NO: 493 - protein, 250 aa, Synthetic construct
MAEIGTGFPFDPHYVEVLGERMHYVDVGPRDGTPVLFLHGNPTSSYVWRNIIPHVAPTHRCIAPDLIGMGKSDKPDLGYFFDDHVRFMDAFIEALGLEEVVLVIHDWGSALGFHWAKRNPERVKGIAFMEFIRPIPTWDEWPEFARETFQAFRTTDVGRKLIIDQNVFIEGTLPMGVVRPLTEVEMDHYREPFLNPVDREPLWRFPNELPIAGEPANIVALVEEYMDWLHQSPVPKLLFWGTPGVLIPPA

SEQ ID NO: 494 - protein, 46 aa, Synthetic construct
AARLAKSLPNCKAVDIGPGLNLLQEDNPDLIGSEIARWLSTLEISG

SEQ ID NO: 495 - protein, 251 aa, Synthetic construct
MAEIGTGFPFDPHYVEVLGERMHYVDVGPRDGTPVLFLHGNPTSSYVWRNIIPHVAPTHRCIAPDLIGMGKSDKPDLGYFFDDHVRFMDAFIEALGLEEVVLVIHDWGSALGFHWAKRNPERVKGIAFMEFIRPIPTWDEWPEFARETFQAFRTTDVGRKLIIDQNVFIEGTLPMGVVRPLTEVEMDHYREPFLNPVDREPLWRFPNELPIAGEPANIVALVEEYMDWLHQSPVPKLLFWGTPGVLIPPAE

SEQ ID NO: 496 - protein, 45 aa, Synthetic construct
ARLAKSLPNCKAVDIGPGLNLLQEDNPDLIGSEIARWLSTLEISG

SEQ ID NO: 497 - protein, 252 aa, Synthetic construct
MAEIGTGFPFDPHYVEVLGERMHYVDVGPRDGTPVLFLHGNPTSSYVWRNIIPHVAPTHRCIAPDLIGMGKSDKPDLGYFFDDHVRFMDAFIEALGLEEVVLVIHDWGSALGFHWAKRNPERVKGIAFMEFIRPIPTWDEWPEFARETFQAFRTTDVGRKLIIDQNVFIEGTLPMGVVRPLTEVEMDHYREPFLNPVDREPLWRFPNELPIAGEPANIVALVEEYMDWLHQSPVPKLLFWGTPGVLIPPAEA

SEQ ID NO: 498 - protein, 44 aa, Synthetic construct
RLAKSLPNCKAVDIGPGLNLLQEDNPDLIGSEIARWLSTLEISG

SEQ ID NO: 499 - protein, 253 aa, Synthetic construct
MAEIGTGFPFDPHYVEVLGERMHYVDVGPRDGTPVLFLHGNPTSSYVWRNIIPHVAPTHRCIAPDLIGMGKSDKPDLGYFFDDHVRFMDAFIEALGLEEVVLVIHDWGSALGFHWAKRNPERVKGIAFMEFIRPIPTWDEWPEFARETFQAFRTTDVGRKLIIDQNVFIEGTLPMGVVRPLTEVEMDHYREPFLNPVDREPLWRFPNELPIAGEPANIVALVEEYMDWLHQSPVPKLLFWGTPGVLIPPAEAA

SEQ ID NO: 500 - protein, 43 aa, Synthetic construct
LAKSLPNCKAVDIGPGLNLLQEDNPDLIGSEIARWLSTLEISG

SEQ ID NO: 501 - protein, 254 aa, Synthetic construct
MAEIGTGFPFDPHYVEVLGERMHYVDVGPRDGTPVLFLHGNPTSSYVWRNIIPHVAPTHRCIAPDLIGMGKSDKPDLGYFFDDHVRFMDAFIEALGLEEVVLVIHDWGSALGFHWAKRNPERVKGIAFMEFIRPIPTWDEWPEFARETFQAFRTTDVGRKLIIDQNVFIEGTLPMGVVRPLTEVEMDHYREPFLNPVDREPLWRFPNELPIAGEPANIVALVEEYMDWLHQSPVPKLLFWGTPGVLIPPAEAAR

SEQ ID NO: 502 - protein, 42 aa, Synthetic construct
AKSLPNCKAVDIGPGLNLLQEDNPDLIGSEIARWLSTLEISG

SEQ ID NO: 503 - protein, 255 aa, Synthetic construct
MAEIGTGFPFDPHYVEVLGERMHYVDVGPRDGTPVLFLHGNPTSSYVWRNIIPHVAPTHRCIAPDLIGMGKSDKPDLGYFFDDHVRFMDAFIEALGLEEVVLVIHDWGSALGFHWAKRNPERVKGIAFMEFIRPIPTWDEWPEFARETFQAFRTTDVGRKLIIDQNVFIEGTLPMGVVRPLTEVEMDHYREPFLNPVDREPLWRFPNELPIAGEPANIVALVEEYMDWLHQSPVPKLLFWGTPGVLIPPAEAARL

SEQ ID NO: 504 - protein, 41 aa, Synthetic construct
KSLPNCKAVDIGPGLNLLQEDNPDLIGSEIARWLSTLEISG

SEQ ID NO: 505 - protein, 256 aa, Synthetic construct
MAEIGTGFPFDPHYVEVLGERMHYVDVGPRDGTPVLFLHGNPTSSYVWRNIIPHVAPTHRCIAPDLIGMGKSDKPDLGYFFDDHVRFMDAFIEALGLEEVVLVIHDWGSALGFHWAKRNPERVKGIAFMEFIRPIPTWDEWPEFARETFQAFRTTDVGRKLIIDQNVFIEGTLPMGVVRPLTEVEMDHYREPFLNPVDREPLWRFPNELPIAGEPANIVALVEEYMDWLHQSPVPKLLFWGTPGVLIPPAEAARLA

SEQ ID NO: 506 - protein, 40 aa, Synthetic construct
SLPNCKAVDIGPGLNLLQEDNPDLIGSEIARWLSTLEISG

SEQ ID NO: 507 - protein, 257 aa, Synthetic construct
MAEIGTGFPFDPHYVEVLGERMHYVDVGPRDGTPVLFLHGNPTSSYVWRNIIPHVAPTHRCIAPDLIGMGKSDKPDLGYFFDDHVRFMDAFIEALGLEEVVLVIHDWGSALGFHWAKRNPERVKGIAFMEFIRPIPTWDEWPEFARETFQAFRTTDVGRKLIIDQNVFIEGTLPMGVVRPLTEVEMDHYREPFLNPVDREPLWRFPNELPIAGEPANIVALVEEYMDWLHQSPVPKLLFWGTPGVLIPPAEAARLAK

SEQ ID NO: 508 - protein, 39 aa, Synthetic construct
LPNCKAVDIGPGLNLLQEDNPDLIGSEIARWLSTLEISG

SEQ ID NO: 509 - protein, 258 aa, Synthetic construct
MAEIGTGFPFDPHYVEVLGERMHYVDVGPRDGTPVLFLHGNPTSSYVWRNIIPHVAPTHRCIAPDLIGMGKSDKPDLGYFFDDHVRFMDAFIEALGLEEVVLVIHDWGSALGFHWAKRNPERVKGIAFMEFIRPIPTWDEWPEFARETFQAFRTTDVGRKLIIDQNVFIEGTLPMGVVRPLTEVEMDHYREPFLNPVDREPLWRFPNELPIAGEPANIVALVEEYMDWLHQSPVPKLLFWGTPGVLIPPAEAARLAKS

SEQ ID NO: 510 - protein, 38 aa, Synthetic construct
PNCKAVDIGPGLNLLQEDNPDLIGSEIARWLSTLEISG

SEQ ID NO: 511 - protein, 259 aa, Synthetic construct
MAEIGTGFPFDPHYVEVLGERMHYVDVGPRDGTPVLFLHGNPTSSYVWRNIIPHVAPTHRCIAPDLIGMGKSDKPDLGYFFDDHVRFMDAFIEALGLEEVVLVIHDWGSALGFHWAKRNPERVKGIAFMEFIRPIPTWDEWPEFARETFQAFRTTDVGRKLIIDQNVFIEGTLPMGVVRPLTEVEMDHYREPFLNPVDREPLWRFPNELPIAGEPANIVALVEEYMDWLHQSPVPKLLFWGTPGVLIPPAEAARLAKSL

SEQ ID NO: 512 - protein, 37 aa, Synthetic construct
NCKAVDIGPGLNLLQEDNPDLIGSEIARWLSTLEISG

SEQ ID NO: 513 - protein, 260 aa, Synthetic construct
MAEIGTGFPFDPHYVEVLGERMHYVDVGPRDGTPVLFLHGNPTSSYVWRNIIPHVAPTHRCIAPDLIGMGKSDKPDLGYFFDDHVRFMDAFIEALGLEEVVLVIHDWGSALGFHWAKRNPERVKGIAFMEFIRPIPTWDEWPEFARETFQAFRTTDVGRKLIIDQNVFIEGTLPMGVVRPLTEVEMDHYREPFLNPVDREPLWRFPNELPIAGEPANIVALVEEYMDWLHQSPVPKLLFWGTPGVLIPPAEAARLAKSLP

SEQ ID NO: 514 - protein, 36 aa, Synthetic construct
CKAVDIGPGLNLLQEDNPDLIGSEIARWLSTLEISG

SEQ ID NO: 515 - protein, 261 aa, Synthetic construct
MAEIGTGFPFDPHYVEVLGERMHYVDVGPRDGTPVLFLHGNPTSSYVWRNIIPHVAPTHRCIAPDLIGMGKSDKPDLGYFFDDHVRFMDAFIEALGLEEVVLVIHDWGSALGFHWAKRNPERVKGIAFMEFIRPIPTWDEWPEFARETFQAFRTTDVGRKLIIDQNVFIEGTLPMGVVRPLTEVEMDHYREPFLNPVDREPLWRFPNELPIAGEPANIVALVEEYMDWLHQSPVPKLLFWGTPGVLIPPAEAARLAKSLPN

SEQ ID NO: 516 - protein, 35 aa, Synthetic construct
KAVDIGPGLNLLQEDNPDLIGSEIARWLSTLEISG

SEQ ID NO: 517 - protein, 262 aa, Synthetic construct
MAEIGTGFPFDPHYVEVLGERMHYVDVGPRDGTPVLFLHGNPTSSYVWRNIIPHVAPTHRCIAPDLIGMGKSDKPDLGYFFDDHVRFMDAFIEALGLEEVVLVIHDWGSALGFHWAKRNPERVKGIAFMEFIRPIPTWDEWPEFARETFQAFRTTDVGRKLIIDQNVFIEGTLPMGVVRPLTEVEMDHYREPFLNPVDREPLWRFPNELPIAGEPANIVALVEEYMDWLHQSPVPKLLFWGTPGVLIPPAEAARLAKSLPNC

SEQ ID NO: 518 - protein, 34 aa, Synthetic construct
AVDIGPGLNLLQEDNPDLIGSEIARWLSTLEISG

SEQ ID NO: 519 - protein, 263 aa, Synthetic construct
MAEIGTGFPFDPHYVEVLGERMHYVDVGPRDGTPVLFLHGNPTSSYVWRNIIPHVAPTHRCIAPDLIGMGKSDKPDLGYFFDDHVRFMDAFIEALGLEEVVLVIHDWGSALGFHWAKRNPERVKGIAFMEFIRPIPTWDEWPEFARETFQAFRTTDVGRKLIIDQNVFIEGTLPMGVVRPLTEVEMDHYREPFLNPVDREPLWRFPNELPIAGEPANIVALVEEYMDWLHQSPVPKLLFWGTPGVLIPPAEAARLAKSLPNCK

SEQ ID NO: 520 - protein, 33 aa, Synthetic construct
VDIGPGLNLLQEDNPDLIGSEIARWLSTLEISG

SEQ ID NO: 521 - protein, 264 aa, Synthetic construct
MAEIGTGFPFDPHYVEVLGERMHYVDVGPRDGTPVLFLHGNPTSSYVWRNIIPHVAPTHRCIAPDLIGMGKSDKPDLGYFFDDHVRFMDAFIEALGLEEVVLVIHDWGSALGFHWAKRNPERVKGIAFMEFIRPIPTWDEWPEFARETFQAFRTTDVGRKLIIDQNVFIEGTLPMGVVRPLTEVEMDHYREPFLNPVDREPLWRFPNELPIAGEPANIVALVEEYMDWLHQSPVPKLLFWGTPGVLIPPAEAARLAKSLPNCKA

SEQ ID NO: 522 - protein, 32 aa, Synthetic construct
DIGPGLNLLQEDNPDLIGSEIARWLSTLEISG

SEQ ID NO: 523 - protein, 265 aa, Synthetic construct
MAEIGTGFPFDPHYVEVLGERMHYVDVGPRDGTPVLFLHGNPTSSYVWRNIIPHVAPTHRCIAPDLIGMGKSDKPDLGYFFDDHVRFMDAFIEALGLEEVVLVIHDWGSALGFHWAKRNPERVKGIAFMEFIRPIPTWDEWPEFARETFQAFRTTDVGRKLIIDQNVFIEGTLPMGVVRPLTEVEMDHYREPFLNPVDREPLWRFPNELPIAGEPANIVALVEEYMDWLHQSPVPKLLFWGTPGVLIPPAEAARLAKSLPNCKAV

SEQ ID NO: 524 - protein, 31 aa, Synthetic construct
IGPGLNLLQEDNPDLIGSEIARWLSTLEISG

SEQ ID NO: 525 - protein, 266 aa, Synthetic construct
MAEIGTGFPFDPHYVEVLGERMHYVDVGPRDGTPVLFLHGNPTSSYVWRNIIPHVAPTHRCIAPDLIGMGKSDKPDLGYFFDDHVRFMDAFIEALGLEEVVLVIHDWGSALGFHWAKRNPERVKGIAFMEFIRPIPTWDEWPEFARETFQAFRTTDVGRKLIIDQNVFIEGTLPMGVVRPLTEVEMDHYREPFLNPVDREPLWRFPNELPIAGEPANIVALVEEYMDWLHQSPVPKLLFWGTPGVLIPPAEAARLAKSLPNCKAVD

SEQ ID NO: 526 - protein, 30 aa, Synthetic construct
GPGLNLLQEDNPDLIGSEIARWLSTLEISG

SEQ ID NO: 527 - protein, 267 aa, Synthetic construct
MAEIGTGFPFDPHYVEVLGERMHYVDVGPRDGTPVLFLHGNPTSSYVWRNIIPHVAPTHRCIAPDLIGMGKSDKPDLGYFFDDHVRFMDAFIEALGLEEVVLVIHDWGSALGFHWAKRNPERVKGIAFMEFIRPIPTWDEWPEFARETFQAFRTTDVGRKLIIDQNVFIEGTLPMGVVRPLTEVEMDHYREPFLNPVDREPLWRFPNELPIAGEPANIVALVEEYMDWLHQSPVPKLLFWGTPGVLIPPAEAARLAKSLPNCKAVDI

SEQ ID NO: 528 - protein, 29 aa, Synthetic construct
PGLNLLQEDNPDLIGSEIARWLSTLEISG

SEQ ID NO: 529 - protein, 268 aa, Synthetic construct
MAEIGTGFPFDPHYVEVLGERMHYVDVGPRDGTPVLFLHGNPTSSYVWRNIIPHVAPTHRCIAPDLIGMGKSDKPDLGYFFDDHVRFMDAFIEALGLEEVVLVIHDWGSALGFHWAKRNPERVKGIAFMEFIRPIPTWDEWPEFARETFQAFRTTDVGRKLIIDQNVFIEGTLPMGVVRPLTEVEMDHYREPFLNPVDREPLWRFPNELPIAGEPANIVALVEEYMDWLHQSPVPKLLFWGTPGVLIPPAEAARLAKSLPNCKAVDIG

SEQ ID NO: 530 - protein, 28 aa, Synthetic construct
GLNLLQEDNPDLIGSEIARWLSTLEISG

SEQ ID NO: 531 - protein, 269 aa, Synthetic construct
MAEIGTGFPFDPHYVEVLGERMHYVDVGPRDGTPVLFLHGNPTSSYVWRNIIPHVAPTHRCIAPDLIGMGKSDKPDLGYFFDDHVRFMDAFIEALGLEEVVLVIHDWGSALGFHWAKRNPERVKGIAFMEFIRPIPTWDEWPEFARETFQAFRTTDVGRKLIIDQNVFIEGTLPMGVVRPLTEVEMDHYREPFLNPVDREPLWRFPNELPIAGEPANIVALVEEYMDWLHQSPVPKLLFWGTPGVLIPPAEAARLAKSLPNCKAVDIGP

SEQ ID NO: 532 - protein, 27 aa, Synthetic construct
LNLLQEDNPDLIGSEIARWLSTLEISG

SEQ ID NO: 533 - protein, 270 aa, Synthetic construct
MAEIGTGFPFDPHYVEVLGERMHYVDVGPRDGTPVLFLHGNPTSSYVWRNIIPHVAPTHRCIAPDLIGMGKSDKPDLGYFFDDHVRFMDAFIEALGLEEVVLVIHDWGSALGFHWAKRNPERVKGIAFMEFIRPIPTWDEWPEFARETFQAFRTTDVGRKLIIDQNVFIEGTLPMGVVRPLTEVEMDHYREPFLNPVDREPLWRFPNELPIAGEPANIVALVEEYMDWLHQSPVPKLLFWGTPGVLIPPAEAARLAKSLPNCKAVDIGPG

SEQ ID NO: 534 - protein, 26 aa, Synthetic construct
NLLQEDNPDLIGSEIARWLSTLEISG

SEQ ID NO: 535 - protein, 271 aa, Synthetic construct
MAEIGTGFPFDPHYVEVLGERMHYVDVGPRDGTPVLFLHGNPTSSYVWRNIIPHVAPTHRCIAPDLIGMGKSDKPDLGYFFDDHVRFMDAFIEALGLEEVVLVIHDWGSALGFHWAKRNPERVKGIAFMEFIRPIPTWDEWPEFARETFQAFRTTDVGRKLIIDQNVFIEGTLPMGVVRPLTEVEMDHYREPFLNPVDREPLWRFPNELPIAGEPANIVALVEEYMDWLHQSPVPKLLFWGTPGVLIPPAEAARLAKSLPNCKAVDIGPGL

SEQ ID NO: 536 - protein, 25 aa, Synthetic construct
LLQEDNPDLIGSEIARWLSTLEISG

SEQ ID NO: 537 - protein, 272 aa, Synthetic construct
MAEIGTGFPFDPHYVEVLGERMHYVDVGPRDGTPVLFLHGNPTSSYVWRNIIPHVAPTHRCIAPDLIGMGKSDKPDLGYFFDDHVRFMDAFIEALGLEEVVLVIHDWGSALGFHWAKRNPERVKGIAFMEFIRPIPTWDEWPEFARETFQAFRTTDVGRKLIIDQNVFIEGTLPMGVVRPLTEVEMDHYREPFLNPVDREPLWRFPNELPIAGEPANIVALVEEYMDWLHQSPVPKLLFWGTPGVLIPPAEAARLAKSLPNCKAVDIGPGLN

SEQ ID NO: 538 - protein, 24 aa, Synthetic construct
LQEDNPDLIGSEIARWLSTLEISG

SEQ ID NO: 539 - protein, 273 aa, Synthetic construct
MAEIGTGFPFDPHYVEVLGERMHYVDVGPRDGTPVLFLHGNPTSSYVWRNIIPHVAPTHRCIAPDLIGMGKSDKPDLGYFFDDHVRFMDAFIEALGLEEVVLVIHDWGSALGFHWAKRNPERVKGIAFMEFIRPIPTWDEWPEFARETFQAFRTTDVGRKLIIDQNVFIEGTLPMGVVRPLTEVEMDHYREPFLNPVDREPLWRFPNELPIAGEPANIVALVEEYMDWLHQSPVPKLLFWGTPGVLIPPAEAARLAKSLPNCKAVDIGPGLNL

SEQ ID NO: 540 - protein, 23 aa, Synthetic construct
QEDNPDLIGSEIARWLSTLEISG

SEQ ID NO: 541 - protein, 274 aa, Synthetic construct
MAEIGTGFPFDPHYVEVLGERMHYVDVGPRDGTPVLFLHGNPTSSYVWRNIIPHVAPTHRCIAPDLIGMGKSDKPDLGYFFDDHVRFMDAFIEALGLEEVVLVIHDWGSALGFHWAKRNPERVKGIAFMEFIRPIPTWDEWPEFARETFQAFRTTDVGRKLIIDQNVFIEGTLPMGVVRPLTEVEMDHYREPFLNPVDREPLWRFPNELPIAGEPANIVALVEEYMDWLHQSPVPKLLFWGTPGVLIPPAEAARLAKSLPNCKAVDIGPGLNLL

SEQ ID NO: 542 - protein, 22 aa, Synthetic construct
EDNPDLIGSEIARWLSTLEISG

SEQ ID NO: 543 - protein, 275 aa, Synthetic construct
MAEIGTGFPFDPHYVEVLGERMHYVDVGPRDGTPVLFLHGNPTSSYVWRNIIPHVAPTHRCIAPDLIGMGKSDKPDLGYFFDDHVRFMDAFIEALGLEEVVLVIHDWGSALGFHWAKRNPERVKGIAFMEFIRPIPTWDEWPEFARETFQAFRTTDVGRKLIIDQNVFIEGTLPMGVVRPLTEVEMDHYREPFLNPVDREPLWRFPNELPIAGEPANIVALVEEYMDWLHQSPVPKLLFWGTPGVLIPPAEAARLAKSLPNCKAVDIGPGLNLLQ

SEQ ID NO: 544 - protein, 21 aa, Synthetic construct
DNPDLIGSEIARWLSTLEISG

SEQ ID NO: 545 - protein, 276 aa, Synthetic construct
MAEIGTGFPFDPHYVEVLGERMHYVDVGPRDGTPVLFLHGNPTSSYVWRNIIPHVAPTHRCIAPDLIGMGKSDKPDLGYFFDDHVRFMDAFIEALGLEEVVLVIHDWGSALGFHWAKRNPERVKGIAFMEFIRPIPTWDEWPEFARETFQAFRTTDVGRKLIIDQNVFIEGTLPMGVVRPLTEVEMDHYREPFLNPVDREPLWRFPNELPIAGEPANIVALVEEYMDWLHQSPVPKLLFWGTPGVLIPPAEAARLAKSLPNCKAVDIGPGLNLLQE

SEQ ID NO: 546 - protein, 20 aa, Synthetic construct
NPDLIGSEIARWLSTLEISG

SEQ ID NO: 547 - protein, 277 aa, Synthetic construct
MAEIGTGFPFDPHYVEVLGERMHYVDVGPRDGTPVLFLHGNPTSSYVWRNIIPHVAPTHRCIAPDLIGMGKSDKPDLGYFFDDHVRFMDAFIEALGLEEVVLVIHDWGSALGFHWAKRNPERVKGIAFMEFIRPIPTWDEWPEFARETFQAFRTTDVGRKLIIDQNVFIEGTLPMGVVRPLTEVEMDHYREPFLNPVDREPLWRFPNELPIAGEPANIVALVEEYMDWLHQSPVPKLLFWGTPGVLIPPAEAARLAKSLPNCKAVDIGPGLNLLQED

SEQ ID NO: 548 - protein, 19 aa, Synthetic construct
PDLIGSEIARWLSTLEISG

SEQ ID NO: 549 - protein, 278 aa, Synthetic construct
MAEIGTGFPFDPHYVEVLGERMHYVDVGPRDGTPVLFLHGNPTSSYVWRNIIPHVAPTHRCIAPDLIGMGKSDKPDLGYFFDDHVRFMDAFIEALGLEEVVLVIHDWGSALGFHWAKRNPERVKGIAFMEFIRPIPTWDEWPEFARETFQAFRTTDVGRKLIIDQNVFIEGTLPMGVVRPLTEVEMDHYREPFLNPVDREPLWRFPNELPIAGEPANIVALVEEYMDWLHQSPVPKLLFWGTPGVLIPPAEAARLAKSLPNCKAVDIGPGLNLLQEDN

SEQ ID NO: 550 - protein, 18 aa, Synthetic construct
DLIGSEIARWLSTLEISG

SEQ ID NO: 551 - protein, 279 aa, Synthetic construct
MAEIGTGFPFDPHYVEVLGERMHYVDVGPRDGTPVLFLHGNPTSSYVWRNIIPHVAPTHRCIAPDLIGMGKSDKPDLGYFFDDHVRFMDAFIEALGLEEVVLVIHDWGSALGFHWAKRNPERVKGIAFMEFIRPIPTWDEWPEFARETFQAFRTTDVGRKLIIDQNVFIEGTLPMGVVRPLTEVEMDHYREPFLNPVDREPLWRFPNELPIAGEPANIVALVEEYMDWLHQSPVPKLLFWGTPGVLIPPAEAARLAKSLPNCKAVDIGPGLNLLQEDNP

SEQ ID NO: 552 - protein, 17 aa, Synthetic construct
LIGSEIARWLSTLEISG

SEQ ID NO: 553 - protein, 280 aa, Synthetic construct
MAEIGTGFPFDPHYVEVLGERMHYVDVGPRDGTPVLFLHGNPTSSYVWRNIIPHVAPTHRCIAPDLIGMGKSDKPDLGYFFDDHVRFMDAFIEALGLEEVVLVIHDWGSALGFHWAKRNPERVKGIAFMEFIRPIPTWDEWPEFARETFQAFRTTDVGRKLIIDQNVFIEGTLPMGVVRPLTEVEMDHYREPFLNPVDREPLWRFPNELPIAGEPANIVALVEEYMDWLHQSPVPKLLFWGTPGVLIPPAEAARLAKSLPNCKAVDIGPGLNLLQEDNPD

SEQ ID NO: 554 - protein, 16 aa, Synthetic construct
IGSEIARWLSTLEISG

SEQ ID NO: 555 - protein, 281 aa, Synthetic construct
MAEIGTGFPFDPHYVEVLGERMHYVDVGPRDGTPVLFLHGNPTSSYVWRNIIPHVAPTHRCIAPDLIGMGKSDKPDLGYFFDDHVRFMDAFIEALGLEEVVLVIHDWGSALGFHWAKRNPERVKGIAFMEFIRPIPTWDEWPEFARETFQAFRTTDVGRKLIIDQNVFIEGTLPMGVVRPLTEVEMDHYREPFLNPVDREPLWRFPNELPIAGEPANIVALVEEYMDWLHQSPVPKLLFWGTPGVLIPPAEAARLAKSLPNCKAVDIGPGLNLLQEDNPDL

SEQ ID NO: 556 - protein, 15 aa, Synthetic construct
GSEIARWLSTLEISG

SEQ ID NO: 557 - protein, 282 aa, Synthetic construct
MAEIGTGFPFDPHYVEVLGERMHYVDVGPRDGTPVLFLHGNPTSSYVWRNIIPHVAPTHRCIAPDLIGMGKSDKPDLGYFFDDHVRFMDAFIEALGLEEVVLVIHDWGSALGFHWAKRNPERVKGIAFMEFIRPIPTWDEWPEFARETFQAFRTTDVGRKLIIDQNVFIEGTLPMGVVRPLTEVEMDHYREPFLNPVDREPLWRFPNELPIAGEPANIVALVEEYMDWLHQSPVPKLLFWGTPGVLIPPAEAARLAKSLPNCKAVDIGPGLNLLQEDNPDLI

SEQ ID NO: 558 - protein, 14 aa, Synthetic construct
SEIARWLSTLEISG

SEQ ID NO: 559 - protein, 283 aa, Synthetic construct
MAEIGTGFPFDPHYVEVLGERMHYVDVGPRDGTPVLFLHGNPTSSYVWRNIIPHVAPTHRCIAPDLIGMGKSDKPDLGYFFDDHVRFMDAFIEALGLEEVVLVIHDWGSALGFHWAKRNPERVKGIAFMEFIRPIPTWDEWPEFARETFQAFRTTDVGRKLIIDQNVFIEGTLPMGVVRPLTEVEMDHYREPFLNPVDREPLWRFPNELPIAGEPANIVALVEEYMDWLHQSPVPKLLFWGTPGVLIPPAEAARLAKSLPNCKAVDIGPGLNLLQEDNPDLIG

SEQ ID NO: 560 - protein, 13 aa, Synthetic construct
EIARWLSTLEISG

SEQ ID NO: 561 - protein, 284 aa, Synthetic construct
MAEIGTGFPFDPHYVEVLGERMHYVDVGPRDGTPVLFLHGNPTSSYVWRNIIPHVAPTHRCIAPDLIGMGKSDKPDLGYFFDDHVRFMDAFIEALGLEEVVLVIHDWGSALGFHWAKRNPERVKGIAFMEFIRPIPTWDEWPEFARETFQAFRTTDVGRKLIIDQNVFIEGTLPMGVVRPLTEVEMDHYREPFLNPVDREPLWRFPNELPIAGEPANIVALVEEYMDWLHQSPVPKLLFWGTPGVLIPPAEAARLAKSLPNCKAVDIGPGLNLLQEDNPDLIGS

SEQ ID NO: 562 - protein, 12 aa, Synthetic construct
IARWLSTLEISG

SEQ ID NO: 563 - protein, 285 aa, Synthetic construct
MAEIGTGFPFDPHYVEVLGERMHYVDVGPRDGTPVLFLHGNPTSSYVWRNIIPHVAPTHRCIAPDLIGMGKSDKPDLGYFFDDHVRFMDAFIEALGLEEVVLVIHDWGSALGFHWAKRNPERVKGIAFMEFIRPIPTWDEWPEFARETFQAFRTTDVGRKLIIDQNVFIEGTLPMGVVRPLTEVEMDHYREPFLNPVDREPLWRFPNELPIAGEPANIVALVEEYMDWLHQSPVPKLLFWGTPGVLIPPAEAARLAKSLPNCKAVDIGPGLNLLQEDNPDLIGSE

SEQ ID NO: 564 - protein, 11 aa, Synthetic construct
ARWLSTLEISG

SEQ ID NO: 565 - protein, 286 aa, Synthetic construct
MAEIGTGFPFDPHYVEVLGERMHYVDVGPRDGTPVLFLHGNPTSSYVWRNIIPHVAPTHRCIAPDLIGMGKSDKPDLGYFFDDHVRFMDAFIEALGLEEVVLVIHDWGSALGFHWAKRNPERVKGIAFMEFIRPIPTWDEWPEFARETFQAFRTTDVGRKLIIDQNVFIEGTLPMGVVRPLTEVEMDHYREPFLNPVDREPLWRFPNELPIAGEPANIVALVEEYMDWLHQSPVPKLLFWGTPGVLIPPAEAARLAKSLPNCKAVDIGPGLNLLQEDNPDLIGSEI

SEQ ID NO: 566 - protein, 10 aa, Synthetic construct
RWLSTLEISG

SEQ ID NO: 567 - protein, 287 aa, Synthetic construct
MAEIGTGFPFDPHYVEVLGERMHYVDVGPRDGTPVLFLHGNPTSSYVWRNIIPHVAPTHRCIAPDLIGMGKSDKPDLGYFFDDHVRFMDAFIEALGLEEVVLVIHDWGSALGFHWAKRNPERVKGIAFMEFIRPIPTWDEWPEFARETFQAFRTTDVGRKLIIDQNVFIEGTLPMGVVRPLTEVEMDHYREPFLNPVDREPLWRFPNELPIAGEPANIVALVEEYMDWLHQSPVPKLLFWGTPGVLIPPAEAARLAKSLPNCKAVDIGPGLNLLQEDNPDLIGSEIA

SEQ ID NO: 568 - protein, 9 aa, Synthetic construct
WLSTLEISG

SEQ ID NO: 569 - protein, 288 aa, Synthetic construct
MAEIGTGFPFDPHYVEVLGERMHYVDVGPRDGTPVLFLHGNPTSSYVWRNIIPHVAPTHRCIAPDLIGMGKSDKPDLGYFFDDHVRFMDAFIEALGLEEVVLVIHDWGSALGFHWAKRNPERVKGIAFMEFIRPIPTWDEWPEFARETFQAFRTTDVGRKLIIDQNVFIEGTLPMGVVRPLTEVEMDHYREPFLNPVDREPLWRFPNELPIAGEPANIVALVEEYMDWLHQSPVPKLLFWGTPGVLIPPAEAARLAKSLPNCKAVDIGPGLNLLQEDNPDLIGSEIAR

SEQ ID NO: 570 - protein, 8 aa, Synthetic construct
LSTLEISG

SEQ ID NO: 571 - protein, 289 aa, Synthetic construct
MAEIGTGFPFDPHYVEVLGERMHYVDVGPRDGTPVLFLHGNPTSSYVWRNIIPHVAPTHRCIAPDLIGMGKSDKPDLGYFFDDHVRFMDAFIEALGLEEVVLVIHDWGSALGFHWAKRNPERVKGIAFMEFIRPIPTWDEWPEFARETFQAFRTTDVGRKLIIDQNVFIEGTLPMGVVRPLTEVEMDHYREPFLNPVDREPLWRFPNELPIAGEPANIVALVEEYMDWLHQSPVPKLLFWGTPGVLIPPAEAARLAKSLPNCKAVDIGPGLNLLQEDNPDLIGSEIARW

SEQ ID NO: 572 - protein, 7 aa, Synthetic construct
STLEISG

SEQ ID NO: 573 - protein, 290 aa, Synthetic construct
MAEIGTGFPFDPHYVEVLGERMHYVDVGPRDGTPVLFLHGNPTSSYVWRNIIPHVAPTHRCIAPDLIGMGKSDKPDLGYFFDDHVRFMDAFIEALGLEEVVLVIHDWGSALGFHWAKRNPERVKGIAFMEFIRPIPTWDEWPEFARETFQAFRTTDVGRKLIIDQNVFIEGTLPMGVVRPLTEVEMDHYREPFLNPVDREPLWRFPNELPIAGEPANIVALVEEYMDWLHQSPVPKLLFWGTPGVLIPPAEAARLAKSLPNCKAVDIGPGLNLLQEDNPDLIGSEIARWL

SEQ ID NO: 574 - protein, 6 aa, Synthetic construct
TLEISG

SEQ ID NO: 575 - protein, 291 aa, Synthetic construct
MAEIGTGFPFDPHYVEVLGERMHYVDVGPRDGTPVLFLHGNPTSSYVWRNIIPHVAPTHRCIAPDLIGMGKSDKPDLGYFFDDHVRFMDAFIEALGLEEVVLVIHDWGSALGFHWAKRNPERVKGIAFMEFIRPIPTWDEWPEFARETFQAFRTTDVGRKLIIDQNVFIEGTLPMGVVRPLTEVEMDHYREPFLNPVDREPLWRFPNELPIAGEPANIVALVEEYMDWLHQSPVPKLLFWGTPGVLIPPAEAARLAKSLPNCKAVDIGPGLNLLQEDNPDLIGSEIARWLS

SEQ ID NO: 576 - protein, 5 aa, Synthetic construct
LEISG

SEQ ID NO: 577 - protein, 292 aa, Synthetic construct
MAEIGTGFPFDPHYVEVLGERMHYVDVGPRDGTPVLFLHGNPTSSYVWRNIIPHVAPTHRCIAPDLIGMGKSDKPDLGYFFDDHVRFMDAFIEALGLEEVVLVIHDWGSALGFHWAKRNPERVKGIAFMEFIRPIPTWDEWPEFARETFQAFRTTDVGRKLIIDQNVFIEGTLPMGVVRPLTEVEMDHYREPFLNPVDREPLWRFPNELPIAGEPANIVALVEEYMDWLHQSPVPKLLFWGTPGVLIPPAEAARLAKSLPNCKAVDIGPGLNLLQEDNPDLIGSEIARWLST

SEQ ID NO: 578 - protein, 17 aa, Synthetic construct
EIGTGFPFDPHYVEVLG

SEQ ID NO: 579 - protein, 17 aa, Synthetic construct
AIGTGFPFDPHYVEVLG

SEQ ID NO: 580 - protein, 17 aa, Synthetic construct
CIGTGFPFDPHYVEVLG

SEQ ID NO: 581 - protein, 17 aa, Synthetic construct
DIGTGFPFDPHYVEVLG

SEQ ID NO: 582 - protein, 17 aa, Synthetic construct
GIGTGFPFDPHYVEVLG

SEQ ID NO: 583 - protein, 17 aa, Synthetic construct
FIGTGFPFDPHYVEVLG

SEQ ID NO: 584 - protein, 17 aa, Synthetic construct
IIGTGFPFDPHYVEVLG

SEQ ID NO: 585 - protein, 17 aa, Synthetic construct
HIGTGFPFDPHYVEVLG

SEQ ID NO: 586 - protein, 17 aa, Synthetic construct
KIGTGFPFDPHYVEVLG

SEQ ID NO: 587 - protein, 17 aa, Synthetic construct
MIGTGFPFDPHYVEVLG

SEQ ID NO: 588 - protein, 17 aa, Synthetic construct
LIGTGFPFDPHYVEVLG

SEQ ID NO: 589 - protein, 17 aa, Synthetic construct
NIGTGFPFDPHYVEVLG

SEQ ID NO: 590 - protein, 17 aa, Synthetic construct
PIGTGFPFDPHYVEVLG

SEQ ID NO: 591 - protein, 17 aa, Synthetic construct
QIGTGFPFDPHYVEVLG

SEQ ID NO: 592 - protein, 17 aa, Synthetic construct
SIGTGFPFDPHYVEVLG

SEQ ID NO: 593 - protein, 17 aa, Synthetic construct
RIGTGFPFDPHYVEVLG

SEQ ID NO: 594 - protein, 17 aa, Synthetic construct
TIGTGFPFDPHYVEVLG

SEQ ID NO: 595 - protein, 17 aa, Synthetic construct
WIGTGFPFDPHYVEVLG

SEQ ID NO: 596 - protein, 17 aa, Synthetic construct
VIGTGFPFDPHYVEVLG

SEQ ID NO: 597 - protein, 17 aa, Synthetic construct
YIGTGFPFDPHYVEVLG

SEQ ID NO: 598 - protein, 17 aa, Synthetic construct
EAGTGFPFDPHYVEVLG

SEQ ID NO: 599 - protein, 17 aa, Synthetic construct
ECGTGFPFDPHYVEVLG

SEQ ID NO: 600 - protein, 17 aa, Synthetic construct
EEGTGFPFDPHYVEVLG

SEQ ID NO: 601 - protein, 17 aa, Synthetic construct
EDGTGFPFDPHYVEVLG

SEQ ID NO: 602 - protein, 17 aa, Synthetic construct
EGGTGFPFDPHYVEVLG

SEQ ID NO: 603 - protein, 17 aa, Synthetic construct
EFGTGFPFDPHYVEVLG

SEQ ID NO: 604 - protein, 17 aa, Synthetic construct
EHGTGFPFDPHYVEVLG

SEQ ID NO: 605 - protein, 17 aa, Synthetic construct
EKGTGFPFDPHYVEVLG

SEQ ID NO: 606 - protein, 17 aa, Synthetic construct
EMGTGFPFDPHYVEVLG

SEQ ID NO: 607 - protein, 17 aa, Synthetic construct
ELGTGFPFDPHYVEVLG

SEQ ID NO: 608 - protein, 17 aa, Synthetic construct
ENGTGFPFDPHYVEVLG

SEQ ID NO: 609 - protein, 17 aa, Synthetic construct
EPGTGFPFDPHYVEVLG

SEQ ID NO: 610 - protein, 17 aa, Synthetic construct
EQGTGFPFDPHYVEVLG

SEQ ID NO: 611 - protein, 17 aa, Synthetic construct
ESGTGFPFDPHYVEVLG

SEQ ID NO: 612 - protein, 17 aa, Synthetic construct
ERGTGFPFDPHYVEVLG

SEQ ID NO: 613 - protein, 17 aa, Synthetic construct
ETGTGFPFDPHYVEVLG

SEQ ID NO: 614 - protein, 17 aa, Synthetic construct
EWGTGFPFDPHYVEVLG

SEQ ID NO: 615 - protein, 17 aa, Synthetic construct
EVGTGFPFDPHYVEVLG

SEQ ID NO: 616 - protein, 17 aa, Synthetic construct
EYGTGFPFDPHYVEVLG

SEQ ID NO: 617 - protein, 17 aa, Synthetic construct
EIATGFPFDPHYVEVLG

SEQ ID NO: 618 - protein, 17 aa, Synthetic construct
EICTGFPFDPHYVEVLG

SEQ ID NO: 619 - protein, 17 aa, Synthetic construct
EIETGFPFDPHYVEVLG

SEQ ID NO: 620 - protein, 17 aa, Synthetic construct
EIDTGFPFDPHYVEVLG

SEQ ID NO: 621 - protein, 17 aa, Synthetic construct
EIFTGFPFDPHYVEVLG

SEQ ID NO: 622 - protein, 17 aa, Synthetic construct
EIITGFPFDPHYVEVLG

SEQ ID NO: 623 - protein, 17 aa, Synthetic construct
EIHTGFPFDPHYVEVLG

SEQ ID NO: 624 - protein, 17 aa, Synthetic construct
EIKTGFPFDPHYVEVLG

SEQ ID NO: 625 - protein, 17 aa, Synthetic construct
EIMTGFPFDPHYVEVLG

SEQ ID NO: 626 - protein, 17 aa, Synthetic construct
EILTGFPFDPHYVEVLG

SEQ ID NO: 627 - protein, 17 aa, Synthetic construct
EINTGFPFDPHYVEVLG

SEQ ID NO: 628 - protein, 17 aa, Synthetic construct
EIPTGFPFDPHYVEVLG

SEQ ID NO: 629 - protein, 17 aa, Synthetic construct
EIQTGFPFDPHYVEVLG

SEQ ID NO: 630 - protein, 17 aa, Synthetic construct
EISTGFPFDPHYVEVLG

SEQ ID NO: 631 - protein, 17 aa, Synthetic construct
EIRTGFPFDPHYVEVLG

SEQ ID NO: 632 - protein, 17 aa, Synthetic construct
EITTGFPFDPHYVEVLG

SEQ ID NO: 633 - protein, 17 aa, Synthetic construct
EIWTGFPFDPHYVEVLG

SEQ ID NO: 634 - protein, 17 aa, Synthetic construct
EIVTGFPFDPHYVEVLG

SEQ ID NO: 635 - protein, 17 aa, Synthetic construct
EIYTGFPFDPHYVEVLG

SEQ ID NO: 636 - protein, 17 aa, Synthetic construct
EIGAGFPFDPHYVEVLG

SEQ ID NO: 637 - protein, 17 aa, Synthetic construct
EIGCGFPFDPHYVEVLG

SEQ ID NO: 638 - protein, 17 aa, Synthetic construct
EIGEGFPFDPHYVEVLG

SEQ ID NO: 639 - protein, 17 aa, Synthetic construct
EIGDGFPFDPHYVEVLG

SEQ ID NO: 640 - protein, 17 aa, Synthetic construct
EIGGGFPFDPHYVEVLG

SEQ ID NO: 641 - protein, 17 aa, Synthetic construct
EIGFGFPFDPHYVEVLG

SEQ ID NO: 642 - protein, 17 aa, Synthetic construct
EIGIGFPFDPHYVEVLG

SEQ ID NO: 643 - protein, 17 aa, Synthetic construct
EIGHGFPFDPHYVEVLG

SEQ ID NO: 644 - protein, 17 aa, Synthetic construct
EIGKGFPFDPHYVEVLG

SEQ ID NO: 645 - protein, 17 aa, Synthetic construct
EIGMGFPFDPHYVEVLG

SEQ ID NO: 646 - protein, 17 aa, Synthetic construct
EIGLGFPFDPHYVEVLG

SEQ ID NO: 647 - protein, 17 aa, Synthetic construct
EIGNGFPFDPHYVEVLG

SEQ ID NO: 648 - protein, 17 aa, Synthetic construct
EIGPGFPFDPHYVEVLG

SEQ ID NO: 649 - protein, 17 aa, Synthetic construct
EIGQGFPFDPHYVEVLG

SEQ ID NO: 650 - protein, 17 aa, Synthetic construct
EIGSGFPFDPHYVEVLG

SEQ ID NO: 651 - protein, 17 aa, Synthetic construct
EIGRGFPFDPHYVEVLG

SEQ ID NO: 652 - protein, 17 aa, Synthetic construct
EIGWGFPFDPHYVEVLG

SEQ ID NO: 653 - protein, 17 aa, Synthetic construct
EIGVGFPFDPHYVEVLG

SEQ ID NO: 654 - protein, 17 aa, Synthetic construct
EIGYGFPFDPHYVEVLG

SEQ ID NO: 655 - protein, 17 aa, Synthetic construct
EIGTAFPFDPHYVEVLG

SEQ ID NO: 656 - protein, 17 aa, Synthetic construct
EIGTCFPFDPHYVEVLG

SEQ ID NO: 657 - protein, 17 aa, Synthetic construct
EIGTEFPFDPHYVEVLG

SEQ ID NO: 658 - protein, 17 aa, Synthetic construct
EIGTDFPFDPHYVEVLG

SEQ ID NO: 659 - protein, 17 aa, Synthetic construct
EIGTFFPFDPHYVEVLG

SEQ ID NO: 660 - protein, 17 aa, Synthetic construct
EIGTIFPFDPHYVEVLG

SEQ ID NO: 661 - protein, 17 aa, Synthetic construct
EIGTHFPFDPHYVEVLG

SEQ ID NO: 662 - protein, 17 aa, Synthetic construct
EIGTKFPFDPHYVEVLG

SEQ ID NO: 663 - protein, 17 aa, Synthetic construct
EIGTMFPFDPHYVEVLG

SEQ ID NO: 664 - protein, 17 aa, Synthetic construct
EIGTLFPFDPHYVEVLG

SEQ ID NO: 665 - protein, 17 aa, Synthetic construct
EIGTNFPFDPHYVEVLG

SEQ ID NO: 666 - protein, 17 aa, Synthetic construct
EIGTPFPFDPHYVEVLG

SEQ ID NO: 667 - protein, 17 aa, Synthetic construct
EIGTQFPFDPHYVEVLG

SEQ ID NO: 668 - protein, 17 aa, Synthetic construct
EIGTSFPFDPHYVEVLG

SEQ ID NO: 669 - protein, 17 aa, Synthetic construct
EIGTRFPFDPHYVEVLG

SEQ ID NO: 670 - protein, 17 aa, Synthetic construct
EIGTTFPFDPHYVEVLG

SEQ ID NO: 671 - protein, 17 aa, Synthetic construct
EIGTWFPFDPHYVEVLG

SEQ ID NO: 672 - protein, 17 aa, Synthetic construct
EIGTVFPFDPHYVEVLG

SEQ ID NO: 673 - protein, 17 aa, Synthetic construct
EIGTYFPFDPHYVEVLG

SEQ ID NO: 674 - protein, 17 aa, Synthetic construct
EIGTGAPFDPHYVEVLG

SEQ ID NO: 675 - protein, 17 aa, Synthetic construct
EIGTGCPFDPHYVEVLG

SEQ ID NO: 676 - protein, 17 aa, Synthetic construct
EIGTGEPFDPHYVEVLG

SEQ ID NO: 677 - protein, 17 aa, Synthetic construct
EIGTGDPFDPHYVEVLG

SEQ ID NO: 678 - protein, 17 aa, Synthetic construct
EIGTGGPFDPHYVEVLG

SEQ ID NO: 679 - protein, 17 aa, Synthetic construct
EIGTGIPFDPHYVEVLG

SEQ ID NO: 680 - protein, 17 aa, Synthetic construct
EIGTGHPFDPHYVEVLG

SEQ ID NO: 681 - protein, 17 aa, Synthetic construct
EIGTGKPFDPHYVEVLG

SEQ ID NO: 682 - protein, 17 aa, Synthetic construct
EIGTGMPFDPHYVEVLG

SEQ ID NO: 683 - protein, 17 aa, Synthetic construct
EIGTGLPFDPHYVEVLG

SEQ ID NO: 684 - protein, 17 aa, Synthetic construct
EIGTGNPFDPHYVEVLG

SEQ ID NO: 685 - protein, 17 aa, Synthetic construct
EIGTGPPFDPHYVEVLG

SEQ ID NO: 686 - protein, 17 aa, Synthetic construct
EIGTGQPFDPHYVEVLG

SEQ ID NO: 687 - protein, 17 aa, Synthetic construct
EIGTGSPFDPHYVEVLG

SEQ ID NO: 688 - protein, 17 aa, Synthetic construct
EIGTGRPFDPHYVEVLG

SEQ ID NO: 689 - protein, 17 aa, Synthetic construct
EIGTGTPFDPHYVEVLG

SEQ ID NO: 690 - protein, 17 aa, Synthetic construct
EIGTGWPFDPHYVEVLG

SEQ ID NO: 691 - protein, 17 aa, Synthetic construct
EIGTGVPFDPHYVEVLG

SEQ ID NO: 692 - protein, 17 aa, Synthetic construct
EIGTGYPFDPHYVEVLG

SEQ ID NO: 693 - protein, 17 aa, Synthetic construct
EIGTGFAFDPHYVEVLG

SEQ ID NO: 694 - protein, 17 aa, Synthetic construct
EIGTGFCFDPHYVEVLG

SEQ ID NO: 695 - protein, 17 aa, Synthetic construct
EIGTGFEFDPHYVEVLG

SEQ ID NO: 696 - protein, 17 aa, Synthetic construct
EIGTGFDFDPHYVEVLG

SEQ ID NO: 697 - protein, 17 aa, Synthetic construct
EIGTGFGFDPHYVEVLG

SEQ ID NO: 698 - protein, 17 aa, Synthetic construct
EIGTGFFFDPHYVEVLG

SEQ ID NO: 699 - protein, 17 aa, Synthetic construct
EIGTGFIFDPHYVEVLG

SEQ ID NO: 700 - protein, 17 aa, Synthetic construct
EIGTGFHFDPHYVEVLG

SEQ ID NO: 701 - protein, 17 aa, Synthetic construct
EIGTGFKFDPHYVEVLG

SEQ ID NO: 702 - protein, 17 aa, Synthetic construct
EIGTGFMFDPHYVEVLG

SEQ ID NO: 703 - protein, 17 aa, Synthetic construct
EIGTGFLFDPHYVEVLG

SEQ ID NO: 704 - protein, 17 aa, Synthetic construct
EIGTGFNFDPHYVEVLG

SEQ ID NO: 705 - protein, 17 aa, Synthetic construct
EIGTGFQFDPHYVEVLG

SEQ ID NO: 706 - protein, 17 aa, Synthetic construct
EIGTGFSFDPHYVEVLG

SEQ ID NO: 707 - protein, 17 aa, Synthetic construct
EIGTGFRFDPHYVEVLG

SEQ ID NO: 708 - protein, 17 aa, Synthetic construct
EIGTGFTFDPHYVEVLG

SEQ ID NO: 709 - protein, 17 aa, Synthetic construct
EIGTGFWFDPHYVEVLG

SEQ ID NO: 710 - protein, 17 aa, Synthetic construct
EIGTGFVFDPHYVEVLG

SEQ ID NO: 711 - protein, 17 aa, Synthetic construct
EIGTGFYFDPHYVEVLG

SEQ ID NO: 712 - protein, 17 aa, Synthetic construct
EIGTGFPADPHYVEVLG

SEQ ID NO: 713 - protein, 17 aa, Synthetic construct
EIGTGFPCDPHYVEVLG

SEQ ID NO: 714 - protein, 17 aa, Synthetic construct
EIGTGFPEDPHYVEVLG

SEQ ID NO: 715 - protein, 17 aa, Synthetic construct
EIGTGFPDDPHYVEVLG

SEQ ID NO: 716 - protein, 17 aa, Synthetic construct
EIGTGFPGDPHYVEVLG

SEQ ID NO: 717 - protein, 17 aa, Synthetic construct
EIGTGFPIDPHYVEVLG

SEQ ID NO: 718 - protein, 17 aa, Synthetic construct
EIGTGFPHDPHYVEVLG

SEQ ID NO: 719 - protein, 17 aa, Synthetic construct
EIGTGFPKDPHYVEVLG

SEQ ID NO: 720 - protein, 17 aa, Synthetic construct
EIGTGFPMDPHYVEVLG

SEQ ID NO: 721 - protein, 17 aa, Synthetic construct
EIGTGFPLDPHYVEVLG

SEQ ID NO: 722 - protein, 17 aa, Synthetic construct
EIGTGFPNDPHYVEVLG

SEQ ID NO: 723 - protein, 17 aa, Synthetic construct
EIGTGFPPDPHYVEVLG

SEQ ID NO: 724 - protein, 17 aa, Synthetic construct
EIGTGFPQDPHYVEVLG

SEQ ID NO: 725 - protein, 17 aa, Synthetic construct
EIGTGFPSDPHYVEVLG

SEQ ID NO: 726 - protein, 17 aa, Synthetic construct
EIGTGFPRDPHYVEVLG

SEQ ID NO: 727 - protein, 17 aa, Synthetic construct
EIGTGFPTDPHYVEVLG

SEQ ID NO: 728 - protein, 17 aa, Synthetic construct
EIGTGFPWDPHYVEVLG

SEQ ID NO: 729 - protein, 17 aa, Synthetic construct
EIGTGFPVDPHYVEVLG

SEQ ID NO: 730 - protein, 17 aa, Synthetic construct
EIGTGFPYDPHYVEVLG

SEQ ID NO: 731 - protein, 17 aa, Synthetic construct
EIGTGFPFAPHYVEVLG

SEQ ID NO: 732 - protein, 17 aa, Synthetic construct
EIGTGFPFCPHYVEVLG

SEQ ID NO: 733 - protein, 17 aa, Synthetic construct
EIGTGFPFEPHYVEVLG

SEQ ID NO: 734 - protein, 17 aa, Synthetic construct
EIGTGFPFGPHYVEVLG

SEQ ID NO: 735 - protein, 17 aa, Synthetic construct
EIGTGFPFFPHYVEVLG

SEQ ID NO: 736 - protein, 17 aa, Synthetic construct
EIGTGFPFIPHYVEVLG

SEQ ID NO: 737 - protein, 17 aa, Synthetic construct
EIGTGFPFHPHYVEVLG

SEQ ID NO: 738 - protein, 17 aa, Synthetic construct
EIGTGFPFKPHYVEVLG

SEQ ID NO: 739 - protein, 17 aa, Synthetic construct
EIGTGFPFMPHYVEVLG

SEQ ID NO: 740 - protein, 17 aa, Synthetic construct
EIGTGFPFLPHYVEVLG

SEQ ID NO: 741 - protein, 17 aa, Synthetic construct
EIGTGFPFNPHYVEVLG

SEQ ID NO: 742 - protein, 17 aa, Synthetic construct
EIGTGFPFPPHYVEVLG

SEQ ID NO: 743 - protein, 17 aa, Synthetic construct
EIGTGFPFQPHYVEVLG

SEQ ID NO: 744 - protein, 17 aa, Synthetic construct
EIGTGFPFSPHYVEVLG

SEQ ID NO: 745 - protein, 17 aa, Synthetic construct
EIGTGFPFRPHYVEVLG

SEQ ID NO: 746 - protein, 17 aa, Synthetic construct
EIGTGFPFTPHYVEVLG

SEQ ID NO: 747 - protein, 17 aa, Synthetic construct
EIGTGFPFWPHYVEVLG

SEQ ID NO: 748 - protein, 17 aa, Synthetic construct
EIGTGFPFVPHYVEVLG

SEQ ID NO: 749 - protein, 17 aa, Synthetic construct
EIGTGFPFYPHYVEVLG

SEQ ID NO: 750 - protein, 17 aa, Synthetic construct
EIGTGFPFDAHYVEVLG

SEQ ID NO: 751 - protein, 17 aa, Synthetic construct
EIGTGFPFDCHYVEVLG

SEQ ID NO: 752 - protein, 17 aa, Synthetic construct
EIGTGFPFDEHYVEVLG

SEQ ID NO: 753 - protein, 17 aa, Synthetic construct
EIGTGFPFDDHYVEVLG

SEQ ID NO: 754 - protein, 17 aa, Synthetic construct
EIGTGFPFDGHYVEVLG

SEQ ID NO: 755 - protein, 17 aa, Synthetic construct
EIGTGFPFDFHYVEVLG

SEQ ID NO: 756 - protein, 17 aa, Synthetic construct
EIGTGFPFDIHYVEVLG

SEQ ID NO: 757 - protein, 17 aa, Synthetic construct
EIGTGFPFDHHYVEVLG

SEQ ID NO: 758 - protein, 17 aa, Synthetic construct
EIGTGFPFDKHYVEVLG

SEQ ID NO: 759 - protein, 17 aa, Synthetic construct
EIGTGFPFDMHYVEVLG

SEQ ID NO: 760 - protein, 17 aa, Synthetic construct
EIGTGFPFDLHYVEVLG

SEQ ID NO: 761 - protein, 17 aa, Synthetic construct
EIGTGFPFDNHYVEVLG

SEQ ID NO: 762 - protein, 17 aa, Synthetic construct
EIGTGFPFDQHYVEVLG

SEQ ID NO: 763 - protein, 17 aa, Synthetic construct
EIGTGFPFDSHYVEVLG

SEQ ID NO: 764 - protein, 17 aa, Synthetic construct
EIGTGFPFDRHYVEVLG

SEQ ID NO: 765 - protein, 17 aa, Synthetic construct
EIGTGFPFDTHYVEVLG

SEQ ID NO: 766 - protein, 17 aa, Synthetic construct
EIGTGFPFDWHYVEVLG

SEQ ID NO: 767 - protein, 17 aa, Synthetic construct
EIGTGFPFDVHYVEVLG

SEQ ID NO: 768 - protein, 17 aa, Synthetic construct
EIGTGFPFDYHYVEVLG

SEQ ID NO: 769 - protein, 17 aa, Synthetic construct
EIGTGFPFDPAYVEVLG

SEQ ID NO: 770 - protein, 17 aa, Synthetic construct
EIGTGFPFDPCYVEVLG

SEQ ID NO: 771 - protein, 17 aa, Synthetic construct
EIGTGFPFDPEYVEVLG

SEQ ID NO: 772 - protein, 17 aa, Synthetic construct
EIGTGFPFDPDYVEVLG

SEQ ID NO: 773 - protein, 17 aa, Synthetic construct
EIGTGFPFDPGYVEVLG

SEQ ID NO: 774 - protein, 17 aa, Synthetic construct
EIGTGFPFDPFYVEVLG

SEQ ID NO: 775 - protein, 17 aa, Synthetic construct
EIGTGFPFDPIYVEVLG

SEQ ID NO: 776 - protein, 17 aa, Synthetic construct
EIGTGFPFDPKYVEVLG

SEQ ID NO: 777 - protein, 17 aa, Synthetic construct
EIGTGFPFDPMYVEVLG

SEQ ID NO: 778 - protein, 17 aa, Synthetic construct
EIGTGFPFDPLYVEVLG

SEQ ID NO: 779 - protein, 17 aa, Synthetic construct
EIGTGFPFDPNYVEVLG

SEQ ID NO: 780 - protein, 17 aa, Synthetic construct
EIGTGFPFDPPYVEVLG

SEQ ID NO: 781 - protein, 17 aa, Synthetic construct
EIGTGFPFDPQYVEVLG

SEQ ID NO: 782 - protein, 17 aa, Synthetic construct
EIGTGFPFDPSYVEVLG

SEQ ID NO: 783 - protein, 17 aa, Synthetic construct
EIGTGFPFDPRYVEVLG

SEQ ID NO: 784 - protein, 17 aa, Synthetic construct
EIGTGFPFDPTYVEVLG

SEQ ID NO: 785 - protein, 17 aa, Synthetic construct
EIGTGFPFDPWYVEVLG

SEQ ID NO: 786 - protein, 17 aa, Synthetic construct
EIGTGFPFDPVYVEVLG

SEQ ID NO: 787 - protein, 17 aa, Synthetic construct
EIGTGFPFDPYYVEVLG

SEQ ID NO: 788 - protein, 17 aa, Synthetic construct
EIGTGFPFDPHAVEVLG

SEQ ID NO: 789 - protein, 17 aa, Synthetic construct
EIGTGFPFDPHCVEVLG

SEQ ID NO: 790 - protein, 17 aa, Synthetic construct
EIGTGFPFDPHEVEVLG

SEQ ID NO: 791 - protein, 17 aa, Synthetic construct
EIGTGFPFDPHDVEVLG

SEQ ID NO: 792 - protein, 17 aa, Synthetic construct
EIGTGFPFDPHGVEVLG

SEQ ID NO: 793 - protein, 17 aa, Synthetic construct
EIGTGFPFDPHFVEVLG

SEQ ID NO: 794 - protein, 17 aa, Synthetic construct
EIGTGFPFDPHIVEVLG

SEQ ID NO: 795 - protein, 17 aa, Synthetic construct
EIGTGFPFDPHHVEVLG

SEQ ID NO: 796 - protein, 17 aa, Synthetic construct
EIGTGFPFDPHKVEVLG

SEQ ID NO: 797 - protein, 17 aa, Synthetic construct
EIGTGFPFDPHMVEVLG

SEQ ID NO: 798 - protein, 17 aa, Synthetic construct
EIGTGFPFDPHLVEVLG

SEQ ID NO: 799 - protein, 17 aa, Synthetic construct
EIGTGFPFDPHNVEVLG

SEQ ID NO: 800 - protein, 17 aa, Synthetic construct
EIGTGFPFDPHPVEVLG

SEQ ID NO: 801 - protein, 17 aa, Synthetic construct
EIGTGFPFDPHQVEVLG

SEQ ID NO: 802 - protein, 17 aa, Synthetic construct
EIGTGFPFDPHSVEVLG

SEQ ID NO: 803 - protein, 17 aa, Synthetic construct
EIGTGFPFDPHRVEVLG

SEQ ID NO: 804 - protein, 17 aa, Synthetic construct
EIGTGFPFDPHTVEVLG

SEQ ID NO: 805 - protein, 17 aa, Synthetic construct
EIGTGFPFDPHWVEVLG

SEQ ID NO: 806 - protein, 17 aa, Synthetic construct
EIGTGFPFDPHVVEVLG

SEQ ID NO: 807 - protein, 17 aa, Synthetic construct
EIGTGFPFDPHYAEVLG

SEQ ID NO: 808 - protein, 17 aa, Synthetic construct
EIGTGFPFDPHYCEVLG

SEQ ID NO: 809 - protein, 17 aa, Synthetic construct
EIGTGFPFDPHYEEVLG

SEQ ID NO: 810 - protein, 17 aa, Synthetic construct
EIGTGFPFDPHYDEVLG

SEQ ID NO: 811 - protein, 17 aa, Synthetic construct
EIGTGFPFDPHYGEVLG

SEQ ID NO: 812 - protein, 17 aa, Synthetic construct
EIGTGFPFDPHYFEVLG

SEQ ID NO: 813 - protein, 17 aa, Synthetic construct
EIGTGFPFDPHYIEVLG

SEQ ID NO: 814 - protein, 17 aa, Synthetic construct
EIGTGFPFDPHYHEVLG

SEQ ID NO: 815 - protein, 17 aa, Synthetic construct
EIGTGFPFDPHYKEVLG

SEQ ID NO: 816 - protein, 17 aa, Synthetic construct
EIGTGFPFDPHYMEVLG

SEQ ID NO: 817 - protein, 17 aa, Synthetic construct
EIGTGFPFDPHYLEVLG

SEQ ID NO: 818 - protein, 17 aa, Synthetic construct
EIGTGFPFDPHYNEVLG

SEQ ID NO: 819 - protein, 17 aa, Synthetic construct
EIGTGFPFDPHYPEVLG

SEQ ID NO: 820 - protein, 17 aa, Synthetic construct
EIGTGFPFDPHYQEVLG

SEQ ID NO: 821 - protein, 17 aa, Synthetic construct
EIGTGFPFDPHYSEVLG

SEQ ID NO: 822 - protein, 17 aa, Synthetic construct
EIGTGFPFDPHYREVLG

SEQ ID NO: 823 - protein, 17 aa, Synthetic construct
EIGTGFPFDPHYTEVLG

SEQ ID NO: 824 - protein, 17 aa, Synthetic construct
EIGTGFPFDPHYWEVLG

SEQ ID NO: 825 - protein, 17 aa, Synthetic construct
EIGTGFPFDPHYYEVLG

SEQ ID NO: 826 - protein, 17 aa, Synthetic construct
EIGTGFPFDPHYVAVLG

SEQ ID NO: 827 - protein, 17 aa, Synthetic construct
EIGTGFPFDPHYVCVLG

SEQ ID NO: 828 - protein, 17 aa, Synthetic construct
EIGTGFPFDPHYVDVLG

SEQ ID NO: 829 - protein, 17 aa, Synthetic construct
EIGTGFPFDPHYVGVLG

SEQ ID NO: 830 - protein, 17 aa, Synthetic construct
EIGTGFPFDPHYVFVLG

SEQ ID NO: 831 - protein, 17 aa, Synthetic construct
EIGTGFPFDPHYVIVLG

SEQ ID NO: 832 - protein, 17 aa, Synthetic construct
EIGTGFPFDPHYVHVLG

SEQ ID NO: 833 - protein, 17 aa, Synthetic construct
EIGTGFPFDPHYVKVLG

SEQ ID NO: 834 - protein, 17 aa, Synthetic construct
EIGTGFPFDPHYVMVLG

SEQ ID NO: 835 - protein, 17 aa, Synthetic construct
EIGTGFPFDPHYVLVLG

SEQ ID NO: 836 - protein, 17 aa, Synthetic construct
EIGTGFPFDPHYVNVLG

SEQ ID NO: 837 - protein, 17 aa, Synthetic construct
EIGTGFPFDPHYVPVLG

SEQ ID NO: 838 - protein, 17 aa, Synthetic construct
EIGTGFPFDPHYVQVLG

SEQ ID NO: 839 - protein, 17 aa, Synthetic construct
EIGTGFPFDPHYVSVLG

SEQ ID NO: 840 - protein, 17 aa, Synthetic construct
EIGTGFPFDPHYVRVLG

SEQ ID NO: 841 - protein, 17 aa, Synthetic construct
EIGTGFPFDPHYVTVLG

SEQ ID NO: 842 - protein, 17 aa, Synthetic construct
EIGTGFPFDPHYVWVLG

SEQ ID NO: 843 - protein, 17 aa, Synthetic construct
EIGTGFPFDPHYVVVLG

SEQ ID NO: 844 - protein, 17 aa, Synthetic construct
EIGTGFPFDPHYVYVLG

SEQ ID NO: 845 - protein, 17 aa, Synthetic construct
EIGTGFPFDPHYVEALG

SEQ ID NO: 846 - protein, 17 aa, Synthetic construct
EIGTGFPFDPHYVECLG

SEQ ID NO: 847 - protein, 17 aa, Synthetic construct
EIGTGFPFDPHYVEELG

SEQ ID NO: 848 - protein, 17 aa, Synthetic construct
EIGTGFPFDPHYVEDLG

SEQ ID NO: 849 - protein, 17 aa, Synthetic construct
EIGTGFPFDPHYVEGLG

SEQ ID NO: 850 - protein, 17 aa, Synthetic construct
EIGTGFPFDPHYVEFLG

SEQ ID NO: 851 - protein, 17 aa, Synthetic construct
EIGTGFPFDPHYVEILG

SEQ ID NO: 852 - protein, 17 aa, Synthetic construct
EIGTGFPFDPHYVEHLG

SEQ ID NO: 853 - protein, 17 aa, Synthetic construct
EIGTGFPFDPHYVEKLG

SEQ ID NO: 854 - protein, 17 aa, Synthetic construct
EIGTGFPFDPHYVEMLG

SEQ ID NO: 855 - protein, 17 aa, Synthetic construct
EIGTGFPFDPHYVELLG

SEQ ID NO: 856 - protein, 17 aa, Synthetic construct
EIGTGFPFDPHYVENLG

SEQ ID NO: 857 - protein, 17 aa, Synthetic construct
EIGTGFPFDPHYVEPLG

SEQ ID NO: 858 - protein, 17 aa, Synthetic construct
EIGTGFPFDPHYVEQLG

SEQ ID NO: 859 - protein, 17 aa, Synthetic construct
EIGTGFPFDPHYVESLG

SEQ ID NO: 860 - protein, 17 aa, Synthetic construct
EIGTGFPFDPHYVERLG

SEQ ID NO: 861 - protein, 17 aa, Synthetic construct
EIGTGFPFDPHYVETLG

SEQ ID NO: 862 - protein, 17 aa, Synthetic construct
EIGTGFPFDPHYVEWLG

SEQ ID NO: 863 - protein, 17 aa, Synthetic construct
EIGTGFPFDPHYVEYLG

SEQ ID NO: 864 - protein, 17 aa, Synthetic construct
EIGTGFPFDPHYVEVAG

SEQ ID NO: 865 - protein, 17 aa, Synthetic construct
EIGTGFPFDPHYVEVCG

SEQ ID NO: 866 - protein, 17 aa, Synthetic construct
EIGTGFPFDPHYVEVEG

SEQ ID NO: 867 - protein, 17 aa, Synthetic construct
EIGTGFPFDPHYVEVDG

SEQ ID NO: 868 - protein, 17 aa, Synthetic construct
EIGTGFPFDPHYVEVGG

SEQ ID NO: 869 - protein, 17 aa, Synthetic construct
EIGTGFPFDPHYVEVFG

SEQ ID NO: 870 - protein, 17 aa, Synthetic construct
EIGTGFPFDPHYVEVIG

SEQ ID NO: 871 - protein, 17 aa, Synthetic construct
EIGTGFPFDPHYVEVHG

SEQ ID NO: 872 - protein, 17 aa, Synthetic construct
EIGTGFPFDPHYVEVKG

SEQ ID NO: 873 - protein, 17 aa, Synthetic construct
EIGTGFPFDPHYVEVMG

SEQ ID NO: 874 - protein, 17 aa, Synthetic construct
EIGTGFPFDPHYVEVNG

SEQ ID NO: 875 - protein, 17 aa, Synthetic construct
EIGTGFPFDPHYVEVPG

SEQ ID NO: 876 - protein, 17 aa, Synthetic construct
EIGTGFPFDPHYVEVQG

SEQ ID NO: 877 - protein, 17 aa, Synthetic construct
EIGTGFPFDPHYVEVSG

SEQ ID NO: 878 - protein, 17 aa, Synthetic construct
EIGTGFPFDPHYVEVRG

SEQ ID NO: 879 - protein, 17 aa, Synthetic construct
EIGTGFPFDPHYVEVTG

SEQ ID NO: 880 - protein, 17 aa, Synthetic construct
EIGTGFPFDPHYVEVWG

SEQ ID NO: 881 - protein, 17 aa, Synthetic construct
EIGTGFPFDPHYVEVVG

SEQ ID NO: 882 - protein, 17 aa, Synthetic construct
EIGTGFPFDPHYVEVYG

SEQ ID NO: 883 - protein, 17 aa, Synthetic construct
EIGTGFPFDPHYVEVLA

SEQ ID NO: 884 - protein, 17 aa, Synthetic construct
EIGTGFPFDPHYVEVLC

SEQ ID NO: 885 - protein, 17 aa, Synthetic construct
EIGTGFPFDPHYVEVLE

SEQ ID NO: 886 - protein, 17 aa, Synthetic construct
EIGTGFPFDPHYVEVLD

SEQ ID NO: 887 - protein, 17 aa, Synthetic construct
EIGTGFPFDPHYVEVLF

SEQ ID NO: 888 - protein, 17 aa, Synthetic construct
EIGTGFPFDPHYVEVLI

SEQ ID NO: 889 - protein, 17 aa, Synthetic construct
EIGTGFPFDPHYVEVLH

SEQ ID NO: 890 - protein, 17 aa, Synthetic construct
EIGTGFPFDPHYVEVLK

SEQ ID NO: 891 - protein, 17 aa, Synthetic construct
EIGTGFPFDPHYVEVLM

SEQ ID NO: 892 - protein, 17 aa, Synthetic construct
EIGTGFPFDPHYVEVLL

SEQ ID NO: 893 - protein, 17 aa, Synthetic construct
EIGTGFPFDPHYVEVLN

SEQ ID NO: 894 - protein, 17 aa, Synthetic construct
EIGTGFPFDPHYVEVLP

SEQ ID NO: 895 - protein, 17 aa, Synthetic construct
EIGTGFPFDPHYVEVLQ

SEQ ID NO: 896 - protein, 17 aa, Synthetic construct
EIGTGFPFDPHYVEVLS

SEQ ID NO: 897 - protein, 17 aa, Synthetic construct
EIGTGFPFDPHYVEVLR

SEQ ID NO: 898 - protein, 17 aa, Synthetic construct
EIGTGFPFDPHYVEVLT

SEQ ID NO: 899 - protein, 17 aa, Synthetic construct
EIGTGFPFDPHYVEVLW

SEQ ID NO: 900 - protein, 17 aa, Synthetic construct
EIGTGFPFDPHYVEVLV

SEQ ID NO: 901 - protein, 17 aa, Synthetic construct
EIGTGFPFDPHYVEVLY

SEQ ID NO: 902 - protein, 17 aa, Synthetic construct
EIGTGWPWDPHYVEVLG

SEQ ID NO: 903 - protein, 17 aa, Synthetic construct
EIGTGWPYDPHYVEVLG

SEQ ID NO: 904 - protein, 17 aa, Synthetic construct
EIGTGWPFDPHFVEVLG

SEQ ID NO: 905 - protein, 17 aa, Synthetic construct
EIGTGWPFDPHWVEVLG

SEQ ID NO: 906 - protein, 17 aa, Synthetic construct
EIGTGWPFDPHYLEVLG

SEQ ID NO: 907 - protein, 17 aa, Synthetic construct
EIGTGWPFDPHYIEVLG

SEQ ID NO: 908 - protein, 17 aa, Synthetic construct
EIGTGWPFDPHYMEVLG

SEQ ID NO: 909 - protein, 17 aa, Synthetic construct
EIGTGWPFDPHYVELLG

SEQ ID NO: 910 - protein, 17 aa, Synthetic construct
EIGTGWPFDPHYVEILG

SEQ ID NO: 911 - protein, 17 aa, Synthetic construct
EIGTGYPWDPHYVEVLG

SEQ ID NO: 912 - protein, 17 aa, Synthetic construct
EIGTGYPYDPHYVEVLG

SEQ ID NO: 913 - protein, 17 aa, Synthetic construct
EIGTGYPFDPHFVEVLG

SEQ ID NO: 914 - protein, 17 aa, Synthetic construct
EIGTGYPFDPHWVEVLG

SEQ ID NO: 915 - protein, 17 aa, Synthetic construct
EIGTGYPFDPHYLEVLG

SEQ ID NO: 916 - protein, 17 aa, Synthetic construct
EIGTGYPFDPHYIEVLG

SEQ ID NO: 917 - protein, 17 aa, Synthetic construct
EIGTGYPFDPHYMEVLG

SEQ ID NO: 918 - protein, 17 aa, Synthetic construct
EIGTGYPFDPHYVELLG

SEQ ID NO: 919 - protein, 17 aa, Synthetic construct
EIGTGYPFDPHYVEILG

SEQ ID NO: 920 - protein, 17 aa, Synthetic construct
EIGTGMPWDPHYVEVLG

SEQ ID NO: 921 - protein, 17 aa, Synthetic construct
EIGTGMPYDPHYVEVLG

SEQ ID NO: 922 - protein, 17 aa, Synthetic construct
EIGTGMPFDPHFVEVLG

SEQ ID NO: 923 - protein, 17 aa, Synthetic construct
EIGTGMPFDPHWVEVLG

SEQ ID NO: 924 - protein, 17 aa, Synthetic construct
EIGTGMPFDPHYLEVLG

SEQ ID NO: 925 - protein, 17 aa, Synthetic construct
EIGTGMPFDPHYIEVLG

SEQ ID NO: 926 - protein, 17 aa, Synthetic construct
EIGTGMPFDPHYMEVLG

SEQ ID NO: 927 - protein, 17 aa, Synthetic construct
EIGTGMPFDPHYVELLG

SEQ ID NO: 928 - protein, 17 aa, Synthetic construct
EIGTGMPFDPHYVEILG

SEQ ID NO: 929 - protein, 17 aa, Synthetic construct
EIGTGFPWDPHFVEVLG

SEQ ID NO: 930 - protein, 17 aa, Synthetic construct
EIGTGFPWDPHWVEVLG

SEQ ID NO: 931 - protein, 17 aa, Synthetic construct
EIGTGFPWDPHYLEVLG

SEQ ID NO: 932 - protein, 17 aa, Synthetic construct
EIGTGFPWDPHYIEVLG

SEQ ID NO: 933 - protein, 17 aa, Synthetic construct
EIGTGFPWDPHYMEVLG

SEQ ID NO: 934 - protein, 17 aa, Synthetic construct
EIGTGFPWDPHYVELLG

SEQ ID NO: 935 - protein, 17 aa, Synthetic construct
EIGTGFPWDPHYVEILG

SEQ ID NO: 936 - protein, 17 aa, Synthetic construct
EIGTGFPYDPHFVEVLG

SEQ ID NO: 937 - protein, 17 aa, Synthetic construct
EIGTGFPYDPHWVEVLG

SEQ ID NO: 938 - protein, 17 aa, Synthetic construct
EIGTGFPYDPHYLEVLG

SEQ ID NO: 939 - protein, 17 aa, Synthetic construct
EIGTGFPYDPHYIEVLG

SEQ ID NO: 940 - protein, 17 aa, Synthetic construct
EIGTGFPYDPHYMEVLG

SEQ ID NO: 941 - protein, 17 aa, Synthetic construct
EIGTGFPYDPHYVELLG

SEQ ID NO: 942 - protein, 17 aa, Synthetic construct
EIGTGFPYDPHYVEILG

SEQ ID NO: 943 - protein, 17 aa, Synthetic construct
EIGTGFPFDPHFLEVLG

SEQ ID NO: 944 - protein, 17 aa, Synthetic construct
EIGTGFPFDPHFIEVLG

SEQ ID NO: 945 - protein, 17 aa, Synthetic construct
EIGTGFPFDPHFMEVLG

SEQ ID NO: 946 - protein, 17 aa, Synthetic construct
EIGTGFPFDPHFVELLG

SEQ ID NO: 947 - protein, 17 aa, Synthetic construct
EIGTGFPFDPHFVEILG

SEQ ID NO: 948 - protein, 17 aa, Synthetic construct
EIGTGFPFDPHWLEVLG

SEQ ID NO: 949 - protein, 17 aa, Synthetic construct
EIGTGFPFDPHWIEVLG

SEQ ID NO: 950 - protein, 17 aa, Synthetic construct
EIGTGFPFDPHWMEVLG

SEQ ID NO: 951 - protein, 17 aa, Synthetic construct
EIGTGFPFDPHWVELLG

SEQ ID NO: 952 - protein, 17 aa, Synthetic construct
EIGTGFPFDPHWVEILG

SEQ ID NO: 953 - protein, 17 aa, Synthetic construct
EIGTGFPFDPHYLELLG

SEQ ID NO: 954 - protein, 17 aa, Synthetic construct
EIGTGFPFDPHYLEILG

SEQ ID NO: 955 - protein, 17 aa, Synthetic construct
EIGTGFPFDPHYIELLG

SEQ ID NO: 956 - protein, 17 aa, Synthetic construct
EIGTGFPFDPHYIEILG

SEQ ID NO: 957 - protein, 17 aa, Synthetic construct
EIGTGFPFDPHYMELLG

SEQ ID NO: 958 - protein, 17 aa, Synthetic construct
EIGTGFPFDPHYMEILG

SEQ ID NO: 959 - protein, 17 aa, Synthetic construct
EDDTEFPFDPHYVEVLG

SEQ ID NO: 960 - protein, 17 aa, Synthetic construct
EDDTRFPFDPHYVEVLG

SEQ ID NO: 961 - protein, 17 aa, Synthetic construct
EDDTGFQFDPHYVEVLG

SEQ ID NO: 962 - protein, 17 aa, Synthetic construct
EDDTGFHFDPHYVEVLG

SEQ ID NO: 963 - protein, 17 aa, Synthetic construct
EDDTGFPFDEHYVEVLG

SEQ ID NO: 964 - protein, 17 aa, Synthetic construct
EDDTGFPFDAHYVEVLG

SEQ ID NO: 965 - protein, 17 aa, Synthetic construct
EDDTGFPFDPKYVEVLG

SEQ ID NO: 966 - protein, 17 aa, Synthetic construct
EDGTEFQFDPHYVEVLG

SEQ ID NO: 967 - protein, 17 aa, Synthetic construct
EDGTEFHFDPHYVEVLG

SEQ ID NO: 968 - protein, 17 aa, Synthetic construct
EDGTEFPFDEHYVEVLG

SEQ ID NO: 969 - protein, 17 aa, Synthetic construct
EDGTEFPFDAHYVEVLG

SEQ ID NO: 970 - protein, 17 aa, Synthetic construct
EDGTEFPFDPKYVEVLG

SEQ ID NO: 971 - protein, 17 aa, Synthetic construct
EDGTRFQFDPHYVEVLG

SEQ ID NO: 972 - protein, 17 aa, Synthetic construct
EDGTRFHFDPHYVEVLG

SEQ ID NO: 973 - protein, 17 aa, Synthetic construct
EDGTRFPFDAHYVEVLG

SEQ ID NO: 974 - protein, 17 aa, Synthetic construct
EDGTRFPFDPKYVEVLG

SEQ ID NO: 975 - protein, 17 aa, Synthetic construct
EDGTGFHFDPHYVEVLG

SEQ ID NO: 976 - protein, 17 aa, Synthetic construct
EDGTGFQFDEHYVEVLG

SEQ ID NO: 977 - protein, 17 aa, Synthetic construct
EDGTGFQFDAHYVEVLG

SEQ ID NO: 978 - protein, 17 aa, Synthetic construct
EDGTGFQFDPKYVEVLG

SEQ ID NO: 979 - protein, 17 aa, Synthetic construct
EIDTEFQFDPHYVEVLG

SEQ ID NO: 980 - protein, 17 aa, Synthetic construct
EIDTEFHFDPHYVEVLG

SEQ ID NO: 981 - protein, 17 aa, Synthetic construct
EIDTEFPFDEHYVEVLG

SEQ ID NO: 982 - protein, 17 aa, Synthetic construct
EIDTEFPFDAHYVEVLG

SEQ ID NO: 983 - protein, 17 aa, Synthetic construct
EIDTEFPFDPKYVEVLG

SEQ ID NO: 984 - protein, 17 aa, Synthetic construct
EIDTRFQFDPHYVEVLG

SEQ ID NO: 985 - protein, 17 aa, Synthetic construct
EIDTRFHFDPHYVEVLG

SEQ ID NO: 986 - protein, 17 aa, Synthetic construct
EIDTRFPFDEHYVEVLG

SEQ ID NO: 987 - protein, 17 aa, Synthetic construct
EIDTRFPFDAHYVEVLG

SEQ ID NO: 988 - protein, 17 aa, Synthetic construct
EIDTRFPFDPKYVEVLG

SEQ ID NO: 989 - protein, 17 aa, Synthetic construct
EIDTGFHFDPHYVEVLG

SEQ ID NO: 990 - protein, 17 aa, Synthetic construct
EIDTGFQFDAHYVEVLG

SEQ ID NO: 991 - protein, 17 aa, Synthetic construct
EIDTGFQFDPKYVEVLG

SEQ ID NO: 992 - protein, 17 aa, Synthetic construct
EFNDGFPFDPHYVEVLG

SEQ ID NO: 993 - protein, 17 aa, Synthetic construct
EFNTQFPFDPHYVEVLG

SEQ ID NO: 994 - protein, 17 aa, Synthetic construct
EFNTGFNFDPHYVEVLG

SEQ ID NO: 995 - protein, 17 aa, Synthetic construct
EFNTGFPFDFHYVEVLG

SEQ ID NO: 996 - protein, 17 aa, Synthetic construct
EFNTGFPFDNHYVEVLG

SEQ ID NO: 997 - protein, 17 aa, Synthetic construct
EFNTGFPFDPNYVEVLG

SEQ ID NO: 998 - protein, 17 aa, Synthetic construct
EFGDQFPFDPHYVEVLG

SEQ ID NO: 999 - protein, 17 aa, Synthetic construct
EFGDGFNFDPHYVEVLG

SEQ ID NO: 1000 - protein, 17 aa, Synthetic construct
EFGDGFPFDFHYVEVLG

SEQ ID NO: 1001 - protein, 17 aa, Synthetic construct
EFGDGFPFDNHYVEVLG

SEQ ID NO: 1002 - protein, 17 aa, Synthetic construct
EFGDGFPFDPNYVEVLG

SEQ ID NO: 1003 - protein, 17 aa, Synthetic construct
EFGTQFNFDPHYVEVLG

SEQ ID NO: 1004 - protein, 17 aa, Synthetic construct
EFGTQFPFDFHYVEVLG

SEQ ID NO: 1005 - protein, 17 aa, Synthetic construct
EFGTQFPFDNHYVEVLG

SEQ ID NO: 1006 - protein, 17 aa, Synthetic construct
EFGTQFPFDPNYVEVLG

SEQ ID NO: 1007 - protein, 17 aa, Synthetic construct
EFGTGFNFDFHYVEVLG

SEQ ID NO: 1008 - protein, 17 aa, Synthetic construct
EFGTGFNFDNHYVEVLG

SEQ ID NO: 1009 - protein, 17 aa, Synthetic construct
EFGTGFNFDPNYVEVLG

SEQ ID NO: 1010 - protein, 17 aa, Synthetic construct
EFGTGFPFDFNYVEVLG

SEQ ID NO: 1011 - protein, 17 aa, Synthetic construct
EINDQFPFDPHYVEVLG

SEQ ID NO: 1012 - protein, 17 aa, Synthetic construct
EINDGFNFDPHYVEVLG

SEQ ID NO: 1013 - protein, 17 aa, Synthetic construct
EINDGFPFDFHYVEVLG

SEQ ID NO: 1014 - protein, 17 aa, Synthetic construct
EINDGFPFDNHYVEVLG

SEQ ID NO: 1015 - protein, 17 aa, Synthetic construct
EINDGFPFDPNYVEVLG

SEQ ID NO: 1016 - protein, 17 aa, Synthetic construct
EINTQFNFDPHYVEVLG

SEQ ID NO: 1017 - protein, 17 aa, Synthetic construct
EINTQFPFDFHYVEVLG

SEQ ID NO: 1018 - protein, 17 aa, Synthetic construct
EINTQFPFDNHYVEVLG

SEQ ID NO: 1019 - protein, 17 aa, Synthetic construct
EINTQFPFDPNYVEVLG

SEQ ID NO: 1020 - protein, 17 aa, Synthetic construct
EINTGFNFDFHYVEVLG

SEQ ID NO: 1021 - protein, 17 aa, Synthetic construct
EINTGFNFDNHYVEVLG

SEQ ID NO: 1022 - protein, 17 aa, Synthetic construct
EINTGFNFDPNYVEVLG

SEQ ID NO: 1023 - protein, 17 aa, Synthetic construct
EINTGFPFDFNYVEVLG

SEQ ID NO: 1024 - protein, 17 aa, Synthetic construct
EIGDQFNFDPHYVEVLG

SEQ ID NO: 1025 - protein, 17 aa, Synthetic construct
EIGDQFPFDFHYVEVLG

SEQ ID NO: 1026 - protein, 17 aa, Synthetic construct
EIGDQFPFDNHYVEVLG

SEQ ID NO: 1027 - protein, 17 aa, Synthetic construct
EIGDQFPFDPNYVEVLG

SEQ ID NO: 1028 - protein, 17 aa, Synthetic construct
EIGDGFNFDFHYVEVLG

SEQ ID NO: 1029 - protein, 17 aa, Synthetic construct
EIGDGFNFDNHYVEVLG

SEQ ID NO: 1030 - protein, 17 aa, Synthetic construct
EIGDGFNFDPNYVEVLG

SEQ ID NO: 1031 - protein, 17 aa, Synthetic construct
EIGDGFPFDFNYVEVLG

SEQ ID NO: 1032 - protein, 17 aa, Synthetic construct
EIGTQFNFDFHYVEVLG

SEQ ID NO: 1033 - protein, 17 aa, Synthetic construct
EIGTQFNFDNHYVEVLG

SEQ ID NO: 1034 - protein, 17 aa, Synthetic construct
EIGTQFNFDPNYVEVLG

SEQ ID NO: 1035 - protein, 17 aa, Synthetic construct
EIGTQFPFDFNYVEVLG

SEQ ID NO: 1036 - protein, 17 aa, Synthetic construct
EIGTGFNFDFNYVEVLG

SEQ ID NO: 1037 - protein, 17 aa, Synthetic construct
ERKTEFPFDPHYVEVLG

SEQ ID NO: 1038 - protein, 17 aa, Synthetic construct
ERKTRFPFDPHYVEVLG

SEQ ID NO: 1039 - protein, 17 aa, Synthetic construct
ERKTGFQFDPHYVEVLG

SEQ ID NO: 1040 - protein, 17 aa, Synthetic construct
ERKTGFHFDPHYVEVLG

SEQ ID NO: 1041 - protein, 17 aa, Synthetic construct
ERKTGFPFDEHYVEVLG

SEQ ID NO: 1042 - protein, 17 aa, Synthetic construct
ERKTGFPFDAHYVEVLG

SEQ ID NO: 1043 - protein, 17 aa, Synthetic construct
ERKTGFPFDPKYVEVLG

SEQ ID NO: 1044 - protein, 17 aa, Synthetic construct
ERGTEFQFDPHYVEVLG

SEQ ID NO: 1045 - protein, 17 aa, Synthetic construct
ERGTEFHFDPHYVEVLG

SEQ ID NO: 1046 - protein, 17 aa, Synthetic construct
ERGTEFPFDEHYVEVLG

SEQ ID NO: 1047 - protein, 17 aa, Synthetic construct
ERGTEFPFDAHYVEVLG

SEQ ID NO: 1048 - protein, 17 aa, Synthetic construct
ERGTEFPFDPKYVEVLG

SEQ ID NO: 1049 - protein, 17 aa, Synthetic construct
ERGTRFQFDPHYVEVLG

SEQ ID NO: 1050 - protein, 17 aa, Synthetic construct
ERGTRFHFDPHYVEVLG

SEQ ID NO: 1051 - protein, 17 aa, Synthetic construct
ERGTRFPFDEHYVEVLG

SEQ ID NO: 1052 - protein, 17 aa, Synthetic construct
ERGTRFPFDAHYVEVLG

SEQ ID NO: 1053 - protein, 17 aa, Synthetic construct
ERGTRFPFDPKYVEVLG

SEQ ID NO: 1054 - protein, 17 aa, Synthetic construct
ERGTGFQFDEHYVEVLG

SEQ ID NO: 1055 - protein, 17 aa, Synthetic construct
ERGTGFQFDAHYVEVLG

SEQ ID NO: 1056 - protein, 17 aa, Synthetic construct
ERGTGFQFDPKYVEVLG

SEQ ID NO: 1057 - protein, 17 aa, Synthetic construct
EIKTEFQFDPHYVEVLG

SEQ ID NO: 1058 - protein, 17 aa, Synthetic construct
EIKTEFHFDPHYVEVLG

SEQ ID NO: 1059 - protein, 17 aa, Synthetic construct
EIKTEFPFDEHYVEVLG

SEQ ID NO: 1060 - protein, 17 aa, Synthetic construct
EIKTEFPFDAHYVEVLG

SEQ ID NO: 1061 - protein, 17 aa, Synthetic construct
EIKTEFPFDPKYVEVLG

SEQ ID NO: 1062 - protein, 17 aa, Synthetic construct
EIKTRFQFDPHYVEVLG

SEQ ID NO: 1063 - protein, 17 aa, Synthetic construct
EIKTRFHFDPHYVEVLG

SEQ ID NO: 1064 - protein, 17 aa, Synthetic construct
EIKTRFPFDEHYVEVLG

SEQ ID NO: 1065 - protein, 17 aa, Synthetic construct
EIKTRFPFDAHYVEVLG

SEQ ID NO: 1066 - protein, 17 aa, Synthetic construct
EIKTRFPFDPKYVEVLG

SEQ ID NO: 1067 - protein, 17 aa, Synthetic construct
EIKTGFQFDEHYVEVLG

SEQ ID NO: 1068 - protein, 17 aa, Synthetic construct
EIKTGFQFDAHYVEVLG

SEQ ID NO: 1069 - protein, 17 aa, Synthetic construct
EIKTGFQFDPKYVEVLG

SEQ ID NO: 1070 - protein, 17 aa, Synthetic construct
EIGTEFQFDEHYVEVLG

SEQ ID NO: 1071 - protein, 17 aa, Synthetic construct
EIGTEFQFDAHYVEVLG

SEQ ID NO: 1072 - protein, 17 aa, Synthetic construct
EIGTEFQFDPKYVEVLG

SEQ ID NO: 1073 - protein, 17 aa, Synthetic construct
EIGTRFQFDEHYVEVLG

SEQ ID NO: 1074 - protein, 17 aa, Synthetic construct
EIGTRFQFDAHYVEVLG

SEQ ID NO: 1075 - protein, 17 aa, Synthetic construct
EIGTRFQFDPKYVEVLG

SEQ ID NO: 1076 - protein, 17 aa, Synthetic construct
EIGTGFQFDEKYVEVLG

SEQ ID NO: 1077 - protein, 17 aa, Synthetic construct
EIGTGFQFDAKYVEVLG

SEQ ID NO: 1078 - protein, 17 aa, Synthetic construct
EIGTGWPYDPHFVEVLG

SEQ ID NO: 1079 - protein, 17 aa, Synthetic construct
EIGTGYPYDPHYLEVLG

SEQ ID NO: 1080 - protein, 17 aa, Synthetic construct
EIGTGFPYDPHWLEVLG

SEQ ID NO: 1081 - protein, 17 aa, Synthetic construct
EIGTGFPYDPHYIEILG

SEQ ID NO: 1082 - protein, 17 aa, Synthetic construct
EIGTGFPFDPHWIEILG

SEQ ID NO: 1083 - protein, 17 aa, Synthetic construct
EIGTGWPYDPHWLEVLG

SEQ ID NO: 1084 - protein, 17 aa, Synthetic construct
EIGTGWPYDPHYIEILG

SEQ ID NO: 1085 - protein, 17 aa, Synthetic construct
EIGTGYPYDPHFLEVLG

SEQ ID NO: 1086 - protein, 17 aa, Synthetic construct
EIGTGWPYDPHFLEILG

SEQ ID NO: 1087 - protein, 17 aa, Synthetic construct
ERKTRYPYDPHWLEVLG

SEQ ID NO: 1088 - protein, 17 aa, Synthetic construct
EINTQYNYDPHWLEVLG

SEQ ID NO: 1089 - protein, 17 aa, Synthetic construct
EIGDQYPYDPNWLEVLG

SEQ ID NO: 1090 - protein, 17 aa, Synthetic construct
EIGTRYQYDAHWLEVLG

SEQ ID NO: 1091 - protein, 17 aa, Synthetic construct
EIDTEYPYDEHWLEVLG

SEQ ID NO: 1092 - protein, 17 aa, Synthetic construct
ERKTRWPYDPHYIEILG

SEQ ID NO: 1093 - protein, 17 aa, Synthetic construct
EINTQWNYDPHYIEILG

SEQ ID NO: 1094 - protein, 17 aa, Synthetic construct
EIGDQWPYDPNYIEILG

SEQ ID NO: 1095 - protein, 17 aa, Synthetic construct
EIGTRWQYDAHYIEILG

SEQ ID NO: 1096 - protein, 17 aa, Synthetic construct
EIDTEWPYDEHYIEILG

SEQ ID NO: 1097 - protein, 17 aa, Synthetic construct
ERKTRWPYDPHFLEILG

SEQ ID NO: 1098 - protein, 17 aa, Synthetic construct
EINTQWNYDPHFLEILG

SEQ ID NO: 1099 - protein, 17 aa, Synthetic construct
EIGDQWPYDPNFLEILG

SEQ ID NO: 1100 - protein, 17 aa, Synthetic construct
EIGTRWQYDAHFLEILG

SEQ ID NO: 1101 - protein, 17 aa, Synthetic construct
EIDTEWPYDEHFLEILG

SEQ ID NO: 1102 - protein, 17 aa, Synthetic construct
EIGTQWNYDFHFLEILG

SEQ ID NO: 1103 - protein, 17 aa, Synthetic construct
EIGTGFPFRPHYVKVLG

SEQ ID NO: 1104 - protein, 17 aa, Synthetic construct
EIGTGFPFRPHYVRVLG

SEQ ID NO: 1105 - protein, 17 aa, Synthetic construct
EIGTGFPFRPHYVEVRG

SEQ ID NO: 1106 - protein, 17 aa, Synthetic construct
EIGTGFPFRPHYVEVLR

SEQ ID NO: 1107 - protein, 17 aa, Synthetic construct
EIGTGFPFDPHYVKVRG

SEQ ID NO: 1108 - protein, 17 aa, Synthetic construct
EIGTGFPFDPHYVKVLR

SEQ ID NO: 1109 - protein, 17 aa, Synthetic construct
EIGTGFPFDPHYVRVRG

SEQ ID NO: 1110 - protein, 17 aa, Synthetic construct
EIGTGFPFDPHYVRVLR

SEQ ID NO: 1111 - protein, 17 aa, Synthetic construct
EIGTGFPFRPHYVKVRG

SEQ ID NO: 1112 - protein, 17 aa, Synthetic construct
EIGTGFPFRPHYVKVLR

SEQ ID NO: 1113 - protein, 17 aa, Synthetic construct
EIGTGFPFRPHYVRVRG

SEQ ID NO: 1114 - protein, 17 aa, Synthetic construct
EIGTGFPFRPHYVRVLR

SEQ ID NO: 1115 - protein, 17 aa, Synthetic construct
EIGTGFPFRPHYVKVRR

SEQ ID NO: 1116 - protein, 17 aa, Synthetic construct
ERKTRFPFRPHYVKVRG

SEQ ID NO: 1117 - protein, 17 aa, Synthetic construct
EINTQFNFRPHYVKVRG

SEQ ID NO: 1118 - protein, 17 aa, Synthetic construct
EIGDQFPFRPNYVKVRG

SEQ ID NO: 1119 - protein, 17 aa, Synthetic construct
EIGTRFQFRAHYVKVRG

SEQ ID NO: 1120 - protein, 17 aa, Synthetic construct
EIDTEFPFREHYVKVRG

SEQ ID NO: 1121 - protein, 17 aa, Synthetic construct
ERKTRFPFRPHYVKVLR

SEQ ID NO: 1122 - protein, 17 aa, Synthetic construct
EINTQFNFRPHYVKVLR

SEQ ID NO: 1123 - protein, 17 aa, Synthetic construct
EIGDQFPFRPNYVKVLR

SEQ ID NO: 1124 - protein, 17 aa, Synthetic construct
EIGTRFQFRAHYVKVLR

SEQ ID NO: 1125 - protein, 17 aa, Synthetic construct
EIDTEFPFREHYVKVLR

SEQ ID NO: 1126 - protein, 17 aa, Synthetic construct
ERKTRFPFRPHYVKVRR

SEQ ID NO: 1127 - protein, 17 aa, Synthetic construct
EINTQFNFRPHYVKVRR

SEQ ID NO: 1128 - protein, 17 aa, Synthetic construct
EIGDQFPFRPNYVKVRR

SEQ ID NO: 1129 - protein, 17 aa, Synthetic construct
EIGTRFQFRAHYVKVRR

SEQ ID NO: 1130 - protein, 17 aa, Synthetic construct
EIDTEFPFREHYVKVRR

SEQ ID NO: 1131 - protein, 17 aa, Synthetic construct
EIGTQFNFRFHYVKVRR

SEQ ID NO: 1132 - protein, 17 aa, Synthetic construct
EINDQFNFRPHYVKVRR

SEQ ID NO: 1133 - protein, 17 aa, Synthetic construct
EINTQFNFRPNYVKVRR

SEQ ID NO: 1134 - protein, 17 aa, Synthetic construct
EINDQFNFRPNYVKVRR

SEQ ID NO: 1135 - protein, 17 aa, Synthetic construct
ARNDQFNFRANYVKVRR

SEQ ID NO: 1136 - protein, 17 aa, Synthetic construct
ARNDQFNFRENYVKVRR

SEQ ID NO: 1137 - protein, 17 aa, Synthetic construct
ARNDQFNFRSNYVKVRR

SEQ ID NO: 1138 - protein, 17 aa, Synthetic construct
DRNDQFNFRANYVKVRR

SEQ ID NO: 1139 - protein, 17 aa, Synthetic construct
DRNDQFNFRENYVKVRR

SEQ ID NO: 1140 - protein, 17 aa, Synthetic construct
DRNDQFNFRSNYVKVRR

SEQ ID NO: 1141 - protein, 17 aa, Synthetic construct
KRNDQFNFRANYVKVRR

SEQ ID NO: 1142 - protein, 17 aa, Synthetic construct
KRNDQFNFRENYVKVRR

SEQ ID NO: 1143 - protein, 17 aa, Synthetic construct
KRNDQFNFRSNYVKVRR

SEQ ID NO: 1144 - protein, 17 aa, Synthetic construct
AFNDQFNFRANYVKVRR

SEQ ID NO: 1145 - protein, 17 aa, Synthetic construct
DFNDQFNFRANYVKVRR

SEQ ID NO: 1146 - protein, 17 aa, Synthetic construct
KFNDQFNFRANYVKVRR

SEQ ID NO: 1147 - protein, 17 aa, Synthetic construct
ADNDQFNFRANYVKVRR

SEQ ID NO: 1148 - protein, 17 aa, Synthetic construct
DDNDQFNFRANYVKVRR

SEQ ID NO: 1149 - protein, 17 aa, Synthetic construct
KDNDQFNFRANYVKVRR

SEQ ID NO: 1150 - protein, 17 aa, Synthetic construct
EIGTGWPYRPHFLKIRR

SEQ ID NO: 1151 - protein, 17 aa, Synthetic construct
ARGTGWPYRAHFLKIRR

SEQ ID NO: 1152 - protein, 17 aa, Synthetic construct
ARGTGWPYREHFLKIRR

SEQ ID NO: 1153 - protein, 17 aa, Synthetic construct
ARGTGWPYRSHFLKIRR

SEQ ID NO: 1154 - protein, 17 aa, Synthetic construct
DRGTGWPYRAHFLKIRR

SEQ ID NO: 1155 - protein, 17 aa, Synthetic construct
DRGTGWPYREHFLKIRR

SEQ ID NO: 1156 - protein, 17 aa, Synthetic construct
DRGTGWPYRSHFLKIRR

SEQ ID NO: 1157 - protein, 17 aa, Synthetic construct
KRGTGWPYRAHFLKIRR

SEQ ID NO: 1158 - protein, 17 aa, Synthetic construct
KRGTGWPYREHFLKIRR

SEQ ID NO: 1159 - protein, 17 aa, Synthetic construct
KRGTGWPYRSHFLKIRR

SEQ ID NO: 1160 - protein, 17 aa, Synthetic construct
AFGTGWPYRAHFLKIRR

SEQ ID NO: 1161 - protein, 17 aa, Synthetic construct
DFGTGWPYRAHFLKIRR

SEQ ID NO: 1162 - protein, 17 aa, Synthetic construct
KFGTGWPYRAHFLKIRR

SEQ ID NO: 1163 - protein, 17 aa, Synthetic construct
ADGTGWPYRAHFLKIRR

SEQ ID NO: 1164 - protein, 17 aa, Synthetic construct
DDGTGWPYRAHFLKIRR

SEQ ID NO: 1165 - protein, 17 aa, Synthetic construct
KDGTGWPYRAHFLKIRR

SEQ ID NO: 1166 - protein, 17 aa, Synthetic construct
EIGDGWPYRPHFLKIRR

SEQ ID NO: 1167 - protein, 17 aa, Synthetic construct
EIGTGWPYRPNFLKIRR

SEQ ID NO: 1168 - protein, 17 aa, Synthetic construct
EIGDGWPYRPNFLKIRR

SEQ ID NO: 1169 - protein, 17 aa, Synthetic construct
EINTQWNYRPHFLKIRR

SEQ ID NO: 1170 - protein, 17 aa, Synthetic construct
EINDQWNYRPHFLKIRR

SEQ ID NO: 1171 - protein, 17 aa, Synthetic construct
EINDQWNYRPNFLKIRR

SEQ ID NO: 1172 - protein, 17 aa, Synthetic construct
EIGDQWPYRPNFLKIRR

SEQ ID NO: 1173 - protein, 17 aa, Synthetic construct
ARNDQWNYRANFLKIRR

SEQ ID NO: 1174 - protein, 17 aa, Synthetic construct
ARNDQWNYRENFLKIRR

SEQ ID NO: 1175 - protein, 17 aa, Synthetic construct
ARNDQWNYRSNFLKIRR

SEQ ID NO: 1176 - protein, 17 aa, Synthetic construct
DRNDQWNYRANFLKIRR

SEQ ID NO: 1177 - protein, 17 aa, Synthetic construct
DRNDQWNYRENFLKIRR

SEQ ID NO: 1178 - protein, 17 aa, Synthetic construct
DRNDQWNYRSNFLKIRR

SEQ ID NO: 1179 - protein, 17 aa, Synthetic construct
KRNDQWNYRANFLKIRR

SEQ ID NO: 1180 - protein, 17 aa, Synthetic construct
KRNDQWNYRENFLKIRR

SEQ ID NO: 1181 - protein, 17 aa, Synthetic construct
KRNDQWNYRSNFLKIRR

SEQ ID NO: 1182 - protein, 17 aa, Synthetic construct
AFNDQWNYRANFLKIRR

SEQ ID NO: 1183 - protein, 17 aa, Synthetic construct
DFNDQWNYRANFLKIRR

SEQ ID NO: 1184 - protein, 17 aa, Synthetic construct
KFNDQWNYRANFLKIRR

SEQ ID NO: 1185 - protein, 17 aa, Synthetic construct
ADNDQWNYRANFLKIRR

SEQ ID NO: 1186 - protein, 17 aa, Synthetic construct
DDNDQWNYRANFLKIRR

SEQ ID NO: 1187 - protein, 17 aa, Synthetic construct
KDNDQWNYRANFLKIRR

SEQ ID NO: 1188 - protein, 277 aa, Synthetic construct
MFHYVDVGPRDGTPVLFLHGNPTSSYVWRNIIPHVAPTHRCIAPDLIGMGKSDKPDLGYFFDDHVRFMDAFIEALGLEEVVLVIHDWGSALGFHWAKRNPERVKGIAFMEFIRPIPTWDEWPEFARETFQAFRTTDVGRKLIIDQNVFIEGTLPMGVVRPLTEVEMDHYREPFLNPVDREPLWRFPNELPIAGEPANIVALVEEYMDWLHQSPVPKLLFWGTPGVLIPPAEAARLAKSLPNCKAVDIGPGLNLLQEDNPDLIGSEIARWLSTLEISG

SEQ ID NO: 1189 - protein, 277 aa, Synthetic construct
MVHYVDVGPRDGTPVLFLHGNPTSSYVWRNIIPHVAPTHRCIAPDLIGMGKSDKPDLGYFFDDHVRFMDAFIEALGLEEVVLVIHDWGSALGFHWAKRNPERVKGIAFMEFIRPIPTWDEWPEFARETFQAFRTTDVGRKLIIDQNVFIEGTLPMGVVRPLTEVEMDHYREPFLNPVDREPLWRFPNELPIAGEPANIVALVEEYMDWLHQSPVPKLLFWGTPGVLIPPAEAARLAKSLPNCKAVDIGPGLNLLQEDNPDLIGSEIARWLSTLEISG

SEQ ID NO: 1190 - protein, 277 aa, Synthetic construct
MLHYVDVGPRDGTPVLFLHGNPTSSYVWRNIIPHVAPTHRCIAPDLIGMGKSDKPDLGYFFDDHVRFMDAFIEALGLEEVVLVIHDWGSALGFHWAKRNPERVKGIAFMEFIRPIPTWDEWPEFARETFQAFRTTDVGRKLIIDQNVFIEGTLPMGVVRPLTEVEMDHYREPFLNPVDREPLWRFPNELPIAGEPANIVALVEEYMDWLHQSPVPKLLFWGTPGVLIPPAEAARLAKSLPNCKAVDIGPGLNLLQEDNPDLIGSEIARWLSTLEISG

SEQ ID NO: 1191 - protein, 277 aa, Synthetic construct
MRHYVDVGPRDGTPVLFLHGNPTSSYVWRNIIPHVAPTHRCIAPDLIGMGKSDKPDLGYFFDDHVRFMDAFIEALGLEEVVLVIHDWGSALGFHWAKRNPERVKGIAFMEFIRPIPTWDEWPEFARETFQAFRTTDVGRKLIIDQNVFIEGTLPMGVVRPLTEVEMDHYREPFLNPVDREPLWRFPNELPIAGEPANIVALVEEYMDWLHQSPVPKLLFWGTPGVLIPPAEAARLAKSLPNCKAVDIGPGLNLLQEDNPDLIGSEIARWLSTLEISG

SEQ ID NO: 1192 - protein, 277 aa, Synthetic construct
MGHYVDVGPRDGTPVLFLHGNPTSSYVWRNIIPHVAPTHRCIAPDLIGMGKSDKPDLGYFFDDHVRFMDAFIEALGLEEVVLVIHDWGSALGFHWAKRNPERVKGIAFMEFIRPIPTWDEWPEFARETFQAFRTTDVGRKLIIDQNVFIEGTLPMGVVRPLTEVEMDHYREPFLNPVDREPLWRFPNELPIAGEPANIVALVEEYMDWLHQSPVPKLLFWGTPGVLIPPAEAARLAKSLPNCKAVDIGPGLNLLQEDNPDLIGSEIARWLSTLEISG

SEQ ID NO: 1193 - protein, 277 aa, Synthetic construct
MAHYVDVGPRDGTPVLFLHGNPTSSYVWRNIIPHVAPTHRCIAPDLIGMGKSDKPDLGYFFDDHVRFMDAFIEALGLEEVVLVIHDWGSALGFHWAKRNPERVKGIAFMEFIRPIPTWDEWPEFARETFQAFRTTDVGRKLIIDQNVFIEGTLPMGVVRPLTEVEMDHYREPFLNPVDREPLWRFPNELPIAGEPANIVALVEEYMDWLHQSPVPKLLFWGTPGVLIPPAEAARLAKSLPNCKAVDIGPGLNLLQEDNPDLIGSEIARWLSTLEISG

SEQ ID NO: 1194 - protein, 277 aa, Synthetic construct
MFAYVDVGPRDGTPVLFLHGNPTSSYVWRNIIPHVAPTHRCIAPDLIGMGKSDKPDLGYFFDDHVRFMDAFIEALGLEEVVLVIHDWGSALGFHWAKRNPERVKGIAFMEFIRPIPTWDEWPEFARETFQAFRTTDVGRKLIIDQNVFIEGTLPMGVVRPLTEVEMDHYREPFLNPVDREPLWRFPNELPIAGEPANIVALVEEYMDWLHQSPVPKLLFWGTPGVLIPPAEAARLAKSLPNCKAVDIGPGLNLLQEDNPDLIGSEIARWLSTLEISG

SEQ ID NO: 1195 - protein, 277 aa, Synthetic construct
MFSYVDVGPRDGTPVLFLHGNPTSSYVWRNIIPHVAPTHRCIAPDLIGMGKSDKPDLGYFFDDHVRFMDAFIEALGLEEVVLVIHDWGSALGFHWAKRNPERVKGIAFMEFIRPIPTWDEWPEFARETFQAFRTTDVGRKLIIDQNVFIEGTLPMGVVRPLTEVEMDHYREPFLNPVDREPLWRFPNELPIAGEPANIVALVEEYMDWLHQSPVPKLLFWGTPGVLIPPAEAARLAKSLPNCKAVDIGPGLNLLQEDNPDLIGSEIARWLSTLEISG

SEQ ID NO: 1196 - protein, 277 aa, Synthetic construct
MFNYVDVGPRDGTPVLFLHGNPTSSYVWRNIIPHVAPTHRCIAPDLIGMGKSDKPDLGYFFDDHVRFMDAFIEALGLEEVVLVIHDWGSALGFHWAKRNPERVKGIAFMEFIRPIPTWDEWPEFARETFQAFRTTDVGRKLIIDQNVFIEGTLPMGVVRPLTEVEMDHYREPFLNPVDREPLWRFPNELPIAGEPANIVALVEEYMDWLHQSPVPKLLFWGTPGVLIPPAEAARLAKSLPNCKAVDIGPGLNLLQEDNPDLIGSEIARWLSTLEISG

SEQ ID NO: 1197 - protein, 277 aa, Synthetic construct
MFRYVDVGPRDGTPVLFLHGNPTSSYVWRNIIPHVAPTHRCIAPDLIGMGKSDKPDLGYFFDDHVRFMDAFIEALGLEEVVLVIHDWGSALGFHWAKRNPERVKGIAFMEFIRPIPTWDEWPEFARETFQAFRTTDVGRKLIIDQNVFIEGTLPMGVVRPLTEVEMDHYREPFLNPVDREPLWRFPNELPIAGEPANIVALVEEYMDWLHQSPVPKLLFWGTPGVLIPPAEAARLAKSLPNCKAVDIGPGLNLLQEDNPDLIGSEIARWLSTLEISG

SEQ ID NO: 1198 - protein, 277 aa, Synthetic construct
MFTYVDVGPRDGTPVLFLHGNPTSSYVWRNIIPHVAPTHRCIAPDLIGMGKSDKPDLGYFFDDHVRFMDAFIEALGLEEVVLVIHDWGSALGFHWAKRNPERVKGIAFMEFIRPIPTWDEWPEFARETFQAFRTTDVGRKLIIDQNVFIEGTLPMGVVRPLTEVEMDHYREPFLNPVDREPLWRFPNELPIAGEPANIVALVEEYMDWLHQSPVPKLLFWGTPGVLIPPAEAARLAKSLPNCKAVDIGPGLNLLQEDNPDLIGSEIARWLSTLEISG

SEQ ID NO: 1199 - protein, 277 aa, Synthetic construct
MFQYVDVGPRDGTPVLFLHGNPTSSYVWRNIIPHVAPTHRCIAPDLIGMGKSDKPDLGYFFDDHVRFMDAFIEALGLEEVVLVIHDWGSALGFHWAKRNPERVKGIAFMEFIRPIPTWDEWPEFARETFQAFRTTDVGRKLIIDQNVFIEGTLPMGVVRPLTEVEMDHYREPFLNPVDREPLWRFPNELPIAGEPANIVALVEEYMDWLHQSPVPKLLFWGTPGVLIPPAEAARLAKSLPNCKAVDIGPGLNLLQEDNPDLIGSEIARWLSTLEISG

SEQ ID NO: 1200 - protein, 277 aa, Synthetic construct
MFHFVDVGPRDGTPVLFLHGNPTSSYVWRNIIPHVAPTHRCIAPDLIGMGKSDKPDLGYFFDDHVRFMDAFIEALGLEEVVLVIHDWGSALGFHWAKRNPERVKGIAFMEFIRPIPTWDEWPEFARETFQAFRTTDVGRKLIIDQNVFIEGTLPMGVVRPLTEVEMDHYREPFLNPVDREPLWRFPNELPIAGEPANIVALVEEYMDWLHQSPVPKLLFWGTPGVLIPPAEAARLAKSLPNCKAVDIGPGLNLLQEDNPDLIGSEIARWLSTLEISG

SEQ ID NO: 1201 - protein, 277 aa, Synthetic construct
MFHHVDVGPRDGTPVLFLHGNPTSSYVWRNIIPHVAPTHRCIAPDLIGMGKSDKPDLGYFFDDHVRFMDAFIEALGLEEVVLVIHDWGSALGFHWAKRNPERVKGIAFMEFIRPIPTWDEWPEFARETFQAFRTTDVGRKLIIDQNVFIEGTLPMGVVRPLTEVEMDHYREPFLNPVDREPLWRFPNELPIAGEPANIVALVEEYMDWLHQSPVPKLLFWGTPGVLIPPAEAARLAKSLPNCKAVDIGPGLNLLQEDNPDLIGSEIARWLSTLEISG

SEQ ID NO: 1202 - protein, 277 aa, Synthetic construct
MFHVVDVGPRDGTPVLFLHGNPTSSYVWRNIIPHVAPTHRCIAPDLIGMGKSDKPDLGYFFDDHVRFMDAFIEALGLEEVVLVIHDWGSALGFHWAKRNPERVKGIAFMEFIRPIPTWDEWPEFARETFQAFRTTDVGRKLIIDQNVFIEGTLPMGVVRPLTEVEMDHYREPFLNPVDREPLWRFPNELPIAGEPANIVALVEEYMDWLHQSPVPKLLFWGTPGVLIPPAEAARLAKSLPNCKAVDIGPGLNLLQEDNPDLIGSEIARWLSTLEISG

SEQ ID NO: 1203 - protein, 277 aa, Synthetic construct
MFHCVDVGPRDGTPVLFLHGNPTSSYVWRNIIPHVAPTHRCIAPDLIGMGKSDKPDLGYFFDDHVRFMDAFIEALGLEEVVLVIHDWGSALGFHWAKRNPERVKGIAFMEFIRPIPTWDEWPEFARETFQAFRTTDVGRKLIIDQNVFIEGTLPMGVVRPLTEVEMDHYREPFLNPVDREPLWRFPNELPIAGEPANIVALVEEYMDWLHQSPVPKLLFWGTPGVLIPPAEAARLAKSLPNCKAVDIGPGLNLLQEDNPDLIGSEIARWLSTLEISG

SEQ ID NO: 1204 - protein, 277 aa, Synthetic construct
MFHLVDVGPRDGTPVLFLHGNPTSSYVWRNIIPHVAPTHRCIAPDLIGMGKSDKPDLGYFFDDHVRFMDAFIEALGLEEVVLVIHDWGSALGFHWAKRNPERVKGIAFMEFIRPIPTWDEWPEFARETFQAFRTTDVGRKLIIDQNVFIEGTLPMGVVRPLTEVEMDHYREPFLNPVDREPLWRFPNELPIAGEPANIVALVEEYMDWLHQSPVPKLLFWGTPGVLIPPAEAARLAKSLPNCKAVDIGPGLNLLQEDNPDLIGSEIARWLSTLEISG

SEQ ID NO: 1205 - protein, 277 aa, Synthetic construct
MFHWVDVGPRDGTPVLFLHGNPTSSYVWRNIIPHVAPTHRCIAPDLIGMGKSDKPDLGYFFDDHVRFMDAFIEALGLEEVVLVIHDWGSALGFHWAKRNPERVKGIAFMEFIRPIPTWDEWPEFARETFQAFRTTDVGRKLIIDQNVFIEGTLPMGVVRPLTEVEMDHYREPFLNPVDREPLWRFPNELPIAGEPANIVALVEEYMDWLHQSPVPKLLFWGTPGVLIPPAEAARLAKSLPNCKAVDIGPGLNLLQEDNPDLIGSEIARWLSTLEISG

SEQ ID NO: 1206 - protein, 277 aa, Synthetic construct
MFHYIDVGPRDGTPVLFLHGNPTSSYVWRNIIPHVAPTHRCIAPDLIGMGKSDKPDLGYFFDDHVRFMDAFIEALGLEEVVLVIHDWGSALGFHWAKRNPERVKGIAFMEFIRPIPTWDEWPEFARETFQAFRTTDVGRKLIIDQNVFIEGTLPMGVVRPLTEVEMDHYREPFLNPVDREPLWRFPNELPIAGEPANIVALVEEYMDWLHQSPVPKLLFWGTPGVLIPPAEAARLAKSLPNCKAVDIGPGLNLLQEDNPDLIGSEIARWLSTLEISG

SEQ ID NO: 1207 - protein, 277 aa, Synthetic construct
MFHYLDVGPRDGTPVLFLHGNPTSSYVWRNIIPHVAPTHRCIAPDLIGMGKSDKPDLGYFFDDHVRFMDAFIEALGLEEVVLVIHDWGSALGFHWAKRNPERVKGIAFMEFIRPIPTWDEWPEFARETFQAFRTTDVGRKLIIDQNVFIEGTLPMGVVRPLTEVEMDHYREPFLNPVDREPLWRFPNELPIAGEPANIVALVEEYMDWLHQSPVPKLLFWGTPGVLIPPAEAARLAKSLPNCKAVDIGPGLNLLQEDNPDLIGSEIARWLSTLEISG

SEQ ID NO: 1208 - protein, 277 aa, Synthetic construct
MFHYRDVGPRDGTPVLFLHGNPTSSYVWRNIIPHVAPTHRCIAPDLIGMGKSDKPDLGYFFDDHVRFMDAFIEALGLEEVVLVIHDWGSALGFHWAKRNPERVKGIAFMEFIRPIPTWDEWPEFARETFQAFRTTDVGRKLIIDQNVFIEGTLPMGVVRPLTEVEMDHYREPFLNPVDREPLWRFPNELPIAGEPANIVALVEEYMDWLHQSPVPKLLFWGTPGVLIPPAEAARLAKSLPNCKAVDIGPGLNLLQEDNPDLIGSEIARWLSTLEISG

SEQ ID NO: 1209 - protein, 277 aa, Synthetic construct
MFHYTDVGPRDGTPVLFLHGNPTSSYVWRNIIPHVAPTHRCIAPDLIGMGKSDKPDLGYFFDDHVRFMDAFIEALGLEEVVLVIHDWGSALGFHWAKRNPERVKGIAFMEFIRPIPTWDEWPEFARETFQAFRTTDVGRKLIIDQNVFIEGTLPMGVVRPLTEVEMDHYREPFLNPVDREPLWRFPNELPIAGEPANIVALVEEYMDWLHQSPVPKLLFWGTPGVLIPPAEAARLAKSLPNCKAVDIGPGLNLLQEDNPDLIGSEIARWLSTLEISG

SEQ ID NO: 1210 - protein, 277 aa, Synthetic construct
MFHYEDVGPRDGTPVLFLHGNPTSSYVWRNIIPHVAPTHRCIAPDLIGMGKSDKPDLGYFFDDHVRFMDAFIEALGLEEVVLVIHDWGSALGFHWAKRNPERVKGIAFMEFIRPIPTWDEWPEFARETFQAFRTTDVGRKLIIDQNVFIEGTLPMGVVRPLTEVEMDHYREPFLNPVDREPLWRFPNELPIAGEPANIVALVEEYMDWLHQSPVPKLLFWGTPGVLIPPAEAARLAKSLPNCKAVDIGPGLNLLQEDNPDLIGSEIARWLSTLEISG

SEQ ID NO: 1211 - protein, 277 aa, Synthetic construct
MFHYHDVGPRDGTPVLFLHGNPTSSYVWRNIIPHVAPTHRCIAPDLIGMGKSDKPDLGYFFDDHVRFMDAFIEALGLEEVVLVIHDWGSALGFHWAKRNPERVKGIAFMEFIRPIPTWDEWPEFARETFQAFRTTDVGRKLIIDQNVFIEGTLPMGVVRPLTEVEMDHYREPFLNPVDREPLWRFPNELPIAGEPANIVALVEEYMDWLHQSPVPKLLFWGTPGVLIPPAEAARLAKSLPNCKAVDIGPGLNLLQEDNPDLIGSEIARWLSTLEISG

SEQ ID NO: 1212 - protein, 277 aa, Synthetic construct
MFHYVEVGPRDGTPVLFLHGNPTSSYVWRNIIPHVAPTHRCIAPDLIGMGKSDKPDLGYFFDDHVRFMDAFIEALGLEEVVLVIHDWGSALGFHWAKRNPERVKGIAFMEFIRPIPTWDEWPEFARETFQAFRTTDVGRKLIIDQNVFIEGTLPMGVVRPLTEVEMDHYREPFLNPVDREPLWRFPNELPIAGEPANIVALVEEYMDWLHQSPVPKLLFWGTPGVLIPPAEAARLAKSLPNCKAVDIGPGLNLLQEDNPDLIGSEIARWLSTLEISG

SEQ ID NO: 1213 - protein, 277 aa, Synthetic construct
MFHYVAVGPRDGTPVLFLHGNPTSSYVWRNIIPHVAPTHRCIAPDLIGMGKSDKPDLGYFFDDHVRFMDAFIEALGLEEVVLVIHDWGSALGFHWAKRNPERVKGIAFMEFIRPIPTWDEWPEFARETFQAFRTTDVGRKLIIDQNVFIEGTLPMGVVRPLTEVEMDHYREPFLNPVDREPLWRFPNELPIAGEPANIVALVEEYMDWLHQSPVPKLLFWGTPGVLIPPAEAARLAKSLPNCKAVDIGPGLNLLQEDNPDLIGSEIARWLSTLEISG

SEQ ID NO: 1214 - protein, 277 aa, Synthetic construct
MFHYVSVGPRDGTPVLFLHGNPTSSYVWRNIIPHVAPTHRCIAPDLIGMGKSDKPDLGYFFDDHVRFMDAFIEALGLEEVVLVIHDWGSALGFHWAKRNPERVKGIAFMEFIRPIPTWDEWPEFARETFQAFRTTDVGRKLIIDQNVFIEGTLPMGVVRPLTEVEMDHYREPFLNPVDREPLWRFPNELPIAGEPANIVALVEEYMDWLHQSPVPKLLFWGTPGVLIPPAEAARLAKSLPNCKAVDIGPGLNLLQEDNPDLIGSEIARWLSTLEISG

SEQ ID NO: 1215 - protein, 277 aa, Synthetic construct
MFHYVQVGPRDGTPVLFLHGNPTSSYVWRNIIPHVAPTHRCIAPDLIGMGKSDKPDLGYFFDDHVRFMDAFIEALGLEEVVLVIHDWGSALGFHWAKRNPERVKGIAFMEFIRPIPTWDEWPEFARETFQAFRTTDVGRKLIIDQNVFIEGTLPMGVVRPLTEVEMDHYREPFLNPVDREPLWRFPNELPIAGEPANIVALVEEYMDWLHQSPVPKLLFWGTPGVLIPPAEAARLAKSLPNCKAVDIGPGLNLLQEDNPDLIGSEIARWLSTLEISG

SEQ ID NO: 1216 - protein, 277 aa, Synthetic construct
MFHYVTVGPRDGTPVLFLHGNPTSSYVWRNIIPHVAPTHRCIAPDLIGMGKSDKPDLGYFFDDHVRFMDAFIEALGLEEVVLVIHDWGSALGFHWAKRNPERVKGIAFMEFIRPIPTWDEWPEFARETFQAFRTTDVGRKLIIDQNVFIEGTLPMGVVRPLTEVEMDHYREPFLNPVDREPLWRFPNELPIAGEPANIVALVEEYMDWLHQSPVPKLLFWGTPGVLIPPAEAARLAKSLPNCKAVDIGPGLNLLQEDNPDLIGSEIARWLSTLEISG

SEQ ID NO: 1217 - protein, 277 aa, Synthetic construct
MFHYVNVGPRDGTPVLFLHGNPTSSYVWRNIIPHVAPTHRCIAPDLIGMGKSDKPDLGYFFDDHVRFMDAFIEALGLEEVVLVIHDWGSALGFHWAKRNPERVKGIAFMEFIRPIPTWDEWPEFARETFQAFRTTDVGRKLIIDQNVFIEGTLPMGVVRPLTEVEMDHYREPFLNPVDREPLWRFPNELPIAGEPANIVALVEEYMDWLHQSPVPKLLFWGTPGVLIPPAEAARLAKSLPNCKAVDIGPGLNLLQEDNPDLIGSEIARWLSTLEISG

SEQ ID NO: 1218 - protein, 277 aa, Synthetic construct
MFHYVDEGPRDGTPVLFLHGNPTSSYVWRNIIPHVAPTHRCIAPDLIGMGKSDKPDLGYFFDDHVRFMDAFIEALGLEEVVLVIHDWGSALGFHWAKRNPERVKGIAFMEFIRPIPTWDEWPEFARETFQAFRTTDVGRKLIIDQNVFIEGTLPMGVVRPLTEVEMDHYREPFLNPVDREPLWRFPNELPIAGEPANIVALVEEYMDWLHQSPVPKLLFWGTPGVLIPPAEAARLAKSLPNCKAVDIGPGLNLLQEDNPDLIGSEIARWLSTLEISG

SEQ ID NO: 1219 - protein, 277 aa, Synthetic construct
MFHYVDTGPRDGTPVLFLHGNPTSSYVWRNIIPHVAPTHRCIAPDLIGMGKSDKPDLGYFFDDHVRFMDAFIEALGLEEVVLVIHDWGSALGFHWAKRNPERVKGIAFMEFIRPIPTWDEWPEFARETFQAFRTTDVGRKLIIDQNVFIEGTLPMGVVRPLTEVEMDHYREPFLNPVDREPLWRFPNELPIAGEPANIVALVEEYMDWLHQSPVPKLLFWGTPGVLIPPAEAARLAKSLPNCKAVDIGPGLNLLQEDNPDLIGSEIARWLSTLEISG

SEQ ID NO: 1220 - protein, 277 aa, Synthetic construct
MFHYVDAGPRDGTPVLFLHGNPTSSYVWRNIIPHVAPTHRCIAPDLIGMGKSDKPDLGYFFDDHVRFMDAFIEALGLEEVVLVIHDWGSALGFHWAKRNPERVKGIAFMEFIRPIPTWDEWPEFARETFQAFRTTDVGRKLIIDQNVFIEGTLPMGVVRPLTEVEMDHYREPFLNPVDREPLWRFPNELPIAGEPANIVALVEEYMDWLHQSPVPKLLFWGTPGVLIPPAEAARLAKSLPNCKAVDIGPGLNLLQEDNPDLIGSEIARWLSTLEISG

SEQ ID NO: 1221 - protein, 277 aa, Synthetic construct
MFHYVDSGPRDGTPVLFLHGNPTSSYVWRNIIPHVAPTHRCIAPDLIGMGKSDKPDLGYFFDDHVRFMDAFIEALGLEEVVLVIHDWGSALGFHWAKRNPERVKGIAFMEFIRPIPTWDEWPEFARETFQAFRTTDVGRKLIIDQNVFIEGTLPMGVVRPLTEVEMDHYREPFLNPVDREPLWRFPNELPIAGEPANIVALVEEYMDWLHQSPVPKLLFWGTPGVLIPPAEAARLAKSLPNCKAVDIGPGLNLLQEDNPDLIGSEIARWLSTLEISG

SEQ ID NO: 1222 - protein, 277 aa, Synthetic construct
MFHYVDQGPRDGTPVLFLHGNPTSSYVWRNIIPHVAPTHRCIAPDLIGMGKSDKPDLGYFFDDHVRFMDAFIEALGLEEVVLVIHDWGSALGFHWAKRNPERVKGIAFMEFIRPIPTWDEWPEFARETFQAFRTTDVGRKLIIDQNVFIEGTLPMGVVRPLTEVEMDHYREPFLNPVDREPLWRFPNELPIAGEPANIVALVEEYMDWLHQSPVPKLLFWGTPGVLIPPAEAARLAKSLPNCKAVDIGPGLNLLQEDNPDLIGSEIARWLSTLEISG

SEQ ID NO: 1223 - protein, 277 aa, Synthetic construct
MFHYVDDGPRDGTPVLFLHGNPTSSYVWRNIIPHVAPTHRCIAPDLIGMGKSDKPDLGYFFDDHVRFMDAFIEALGLEEVVLVIHDWGSALGFHWAKRNPERVKGIAFMEFIRPIPTWDEWPEFARETFQAFRTTDVGRKLIIDQNVFIEGTLPMGVVRPLTEVEMDHYREPFLNPVDREPLWRFPNELPIAGEPANIVALVEEYMDWLHQSPVPKLLFWGTPGVLIPPAEAARLAKSLPNCKAVDIGPGLNLLQEDNPDLIGSEIARWLSTLEISG

SEQ ID NO: 1224 - protein, 277 aa, Synthetic construct
MFHYVDVAPRDGTPVLFLHGNPTSSYVWRNIIPHVAPTHRCIAPDLIGMGKSDKPDLGYFFDDHVRFMDAFIEALGLEEVVLVIHDWGSALGFHWAKRNPERVKGIAFMEFIRPIPTWDEWPEFARETFQAFRTTDVGRKLIIDQNVFIEGTLPMGVVRPLTEVEMDHYREPFLNPVDREPLWRFPNELPIAGEPANIVALVEEYMDWLHQSPVPKLLFWGTPGVLIPPAEAARLAKSLPNCKAVDIGPGLNLLQEDNPDLIGSEIARWLSTLEISG

SEQ ID NO: 1225 - protein, 277 aa, Synthetic construct
MFHYVDVDPRDGTPVLFLHGNPTSSYVWRNIIPHVAPTHRCIAPDLIGMGKSDKPDLGYFFDDHVRFMDAFIEALGLEEVVLVIHDWGSALGFHWAKRNPERVKGIAFMEFIRPIPTWDEWPEFARETFQAFRTTDVGRKLIIDQNVFIEGTLPMGVVRPLTEVEMDHYREPFLNPVDREPLWRFPNELPIAGEPANIVALVEEYMDWLHQSPVPKLLFWGTPGVLIPPAEAARLAKSLPNCKAVDIGPGLNLLQEDNPDLIGSEIARWLSTLEISG

SEQ ID NO: 1226 - protein, 277 aa, Synthetic construct
MFHYVDVNPRDGTPVLFLHGNPTSSYVWRNIIPHVAPTHRCIAPDLIGMGKSDKPDLGYFFDDHVRFMDAFIEALGLEEVVLVIHDWGSALGFHWAKRNPERVKGIAFMEFIRPIPTWDEWPEFARETFQAFRTTDVGRKLIIDQNVFIEGTLPMGVVRPLTEVEMDHYREPFLNPVDREPLWRFPNELPIAGEPANIVALVEEYMDWLHQSPVPKLLFWGTPGVLIPPAEAARLAKSLPNCKAVDIGPGLNLLQEDNPDLIGSEIARWLSTLEISG

SEQ ID NO: 1227 - protein, 277 aa, Synthetic construct
MFHYVDVEPRDGTPVLFLHGNPTSSYVWRNIIPHVAPTHRCIAPDLIGMGKSDKPDLGYFFDDHVRFMDAFIEALGLEEVVLVIHDWGSALGFHWAKRNPERVKGIAFMEFIRPIPTWDEWPEFARETFQAFRTTDVGRKLIIDQNVFIEGTLPMGVVRPLTEVEMDHYREPFLNPVDREPLWRFPNELPIAGEPANIVALVEEYMDWLHQSPVPKLLFWGTPGVLIPPAEAARLAKSLPNCKAVDIGPGLNLLQEDNPDLIGSEIARWLSTLEISG

SEQ ID NO: 1228 - protein, 277 aa, Synthetic construct
MFHYVDVSPRDGTPVLFLHGNPTSSYVWRNIIPHVAPTHRCIAPDLIGMGKSDKPDLGYFFDDHVRFMDAFIEALGLEEVVLVIHDWGSALGFHWAKRNPERVKGIAFMEFIRPIPTWDEWPEFARETFQAFRTTDVGRKLIIDQNVFIEGTLPMGVVRPLTEVEMDHYREPFLNPVDREPLWRFPNELPIAGEPANIVALVEEYMDWLHQSPVPKLLFWGTPGVLIPPAEAARLAKSLPNCKAVDIGPGLNLLQEDNPDLIGSEIARWLSTLEISG

SEQ ID NO: 1229 - protein, 277 aa, Synthetic construct
MFHYVDVRPRDGTPVLFLHGNPTSSYVWRNIIPHVAPTHRCIAPDLIGMGKSDKPDLGYFFDDHVRFMDAFIEALGLEEVVLVIHDWGSALGFHWAKRNPERVKGIAFMEFIRPIPTWDEWPEFARETFQAFRTTDVGRKLIIDQNVFIEGTLPMGVVRPLTEVEMDHYREPFLNPVDREPLWRFPNELPIAGEPANIVALVEEYMDWLHQSPVPKLLFWGTPGVLIPPAEAARLAKSLPNCKAVDIGPGLNLLQEDNPDLIGSEIARWLSTLEISG

SEQ ID NO: 1230 - protein, 277 aa, Synthetic construct
MFHYVDVGARDGTPVLFLHGNPTSSYVWRNIIPHVAPTHRCIAPDLIGMGKSDKPDLGYFFDDHVRFMDAFIEALGLEEVVLVIHDWGSALGFHWAKRNPERVKGIAFMEFIRPIPTWDEWPEFARETFQAFRTTDVGRKLIIDQNVFIEGTLPMGVVRPLTEVEMDHYREPFLNPVDREPLWRFPNELPIAGEPANIVALVEEYMDWLHQSPVPKLLFWGTPGVLIPPAEAARLAKSLPNCKAVDIGPGLNLLQEDNPDLIGSEIARWLSTLEISG

SEQ ID NO: 1231 - protein, 277 aa, Synthetic construct
MFHYVDVGSRDGTPVLFLHGNPTSSYVWRNIIPHVAPTHRCIAPDLIGMGKSDKPDLGYFFDDHVRFMDAFIEALGLEEVVLVIHDWGSALGFHWAKRNPERVKGIAFMEFIRPIPTWDEWPEFARETFQAFRTTDVGRKLIIDQNVFIEGTLPMGVVRPLTEVEMDHYREPFLNPVDREPLWRFPNELPIAGEPANIVALVEEYMDWLHQSPVPKLLFWGTPGVLIPPAEAARLAKSLPNCKAVDIGPGLNLLQEDNPDLIGSEIARWLSTLEISG

SEQ ID NO: 1232 - protein, 277 aa, Synthetic construct
MFHYVDVGERDGTPVLFLHGNPTSSYVWRNIIPHVAPTHRCIAPDLIGMGKSDKPDLGYFFDDHVRFMDAFIEALGLEEVVLVIHDWGSALGFHWAKRNPERVKGIAFMEFIRPIPTWDEWPEFARETFQAFRTTDVGRKLIIDQNVFIEGTLPMGVVRPLTEVEMDHYREPFLNPVDREPLWRFPNELPIAGEPANIVALVEEYMDWLHQSPVPKLLFWGTPGVLIPPAEAARLAKSLPNCKAVDIGPGLNLLQEDNPDLIGSEIARWLSTLEISG

SEQ ID NO: 1233 - protein, 277 aa, Synthetic construct
MFHYVDVGDRDGTPVLFLHGNPTSSYVWRNIIPHVAPTHRCIAPDLIGMGKSDKPDLGYFFDDHVRFMDAFIEALGLEEVVLVIHDWGSALGFHWAKRNPERVKGIAFMEFIRPIPTWDEWPEFARETFQAFRTTDVGRKLIIDQNVFIEGTLPMGVVRPLTEVEMDHYREPFLNPVDREPLWRFPNELPIAGEPANIVALVEEYMDWLHQSPVPKLLFWGTPGVLIPPAEAARLAKSLPNCKAVDIGPGLNLLQEDNPDLIGSEIARWLSTLEISG

SEQ ID NO: 1234 - protein, 277 aa, Synthetic construct
MFHYVDVGNRDGTPVLFLHGNPTSSYVWRNIIPHVAPTHRCIAPDLIGMGKSDKPDLGYFFDDHVRFMDAFIEALGLEEVVLVIHDWGSALGFHWAKRNPERVKGIAFMEFIRPIPTWDEWPEFARETFQAFRTTDVGRKLIIDQNVFIEGTLPMGVVRPLTEVEMDHYREPFLNPVDREPLWRFPNELPIAGEPANIVALVEEYMDWLHQSPVPKLLFWGTPGVLIPPAEAARLAKSLPNCKAVDIGPGLNLLQEDNPDLIGSEIARWLSTLEISG

SEQ ID NO: 1235 - protein, 277 aa, Synthetic construct
MFHYVDVGRRDGTPVLFLHGNPTSSYVWRNIIPHVAPTHRCIAPDLIGMGKSDKPDLGYFFDDHVRFMDAFIEALGLEEVVLVIHDWGSALGFHWAKRNPERVKGIAFMEFIRPIPTWDEWPEFARETFQAFRTTDVGRKLIIDQNVFIEGTLPMGVVRPLTEVEMDHYREPFLNPVDREPLWRFPNELPIAGEPANIVALVEEYMDWLHQSPVPKLLFWGTPGVLIPPAEAARLAKSLPNCKAVDIGPGLNLLQEDNPDLIGSEIARWLSTLEISG

SEQ ID NO: 1236 - protein, 277 aa, Synthetic construct
MFHYVDVGPKDGTPVLFLHGNPTSSYVWRNIIPHVAPTHRCIAPDLIGMGKSDKPDLGYFFDDHVRFMDAFIEALGLEEVVLVIHDWGSALGFHWAKRNPERVKGIAFMEFIRPIPTWDEWPEFARETFQAFRTTDVGRKLIIDQNVFIEGTLPMGVVRPLTEVEMDHYREPFLNPVDREPLWRFPNELPIAGEPANIVALVEEYMDWLHQSPVPKLLFWGTPGVLIPPAEAARLAKSLPNCKAVDIGPGLNLLQEDNPDLIGSEIARWLSTLEISG

SEQ ID NO: 1237 - protein, 277 aa, Synthetic construct
MFHYVDVGPADGTPVLFLHGNPTSSYVWRNIIPHVAPTHRCIAPDLIGMGKSDKPDLGYFFDDHVRFMDAFIEALGLEEVVLVIHDWGSALGFHWAKRNPERVKGIAFMEFIRPIPTWDEWPEFARETFQAFRTTDVGRKLIIDQNVFIEGTLPMGVVRPLTEVEMDHYREPFLNPVDREPLWRFPNELPIAGEPANIVALVEEYMDWLHQSPVPKLLFWGTPGVLIPPAEAARLAKSLPNCKAVDIGPGLNLLQEDNPDLIGSEIARWLSTLEISG

SEQ ID NO: 1238 - protein, 277 aa, Synthetic construct
MFHYVDVGPSDGTPVLFLHGNPTSSYVWRNIIPHVAPTHRCIAPDLIGMGKSDKPDLGYFFDDHVRFMDAFIEALGLEEVVLVIHDWGSALGFHWAKRNPERVKGIAFMEFIRPIPTWDEWPEFARETFQAFRTTDVGRKLIIDQNVFIEGTLPMGVVRPLTEVEMDHYREPFLNPVDREPLWRFPNELPIAGEPANIVALVEEYMDWLHQSPVPKLLFWGTPGVLIPPAEAARLAKSLPNCKAVDIGPGLNLLQEDNPDLIGSEIARWLSTLEISG

SEQ ID NO: 1239 - protein, 277 aa, Synthetic construct
MFHYVDVGPEDGTPVLFLHGNPTSSYVWRNIIPHVAPTHRCIAPDLIGMGKSDKPDLGYFFDDHVRFMDAFIEALGLEEVVLVIHDWGSALGFHWAKRNPERVKGIAFMEFIRPIPTWDEWPEFARETFQAFRTTDVGRKLIIDQNVFIEGTLPMGVVRPLTEVEMDHYREPFLNPVDREPLWRFPNELPIAGEPANIVALVEEYMDWLHQSPVPKLLFWGTPGVLIPPAEAARLAKSLPNCKAVDIGPGLNLLQEDNPDLIGSEIARWLSTLEISG

SEQ ID NO: 1240 - protein, 277 aa, Synthetic construct
MFHYVDVGPTDGTPVLFLHGNPTSSYVWRNIIPHVAPTHRCIAPDLIGMGKSDKPDLGYFFDDHVRFMDAFIEALGLEEVVLVIHDWGSALGFHWAKRNPERVKGIAFMEFIRPIPTWDEWPEFARETFQAFRTTDVGRKLIIDQNVFIEGTLPMGVVRPLTEVEMDHYREPFLNPVDREPLWRFPNELPIAGEPANIVALVEEYMDWLHQSPVPKLLFWGTPGVLIPPAEAARLAKSLPNCKAVDIGPGLNLLQEDNPDLIGSEIARWLSTLEISG

SEQ ID NO: 1241 - protein, 277 aa, Synthetic construct
MFHYVDVGPQDGTPVLFLHGNPTSSYVWRNIIPHVAPTHRCIAPDLIGMGKSDKPDLGYFFDDHVRFMDAFIEALGLEEVVLVIHDWGSALGFHWAKRNPERVKGIAFMEFIRPIPTWDEWPEFARETFQAFRTTDVGRKLIIDQNVFIEGTLPMGVVRPLTEVEMDHYREPFLNPVDREPLWRFPNELPIAGEPANIVALVEEYMDWLHQSPVPKLLFWGTPGVLIPPAEAARLAKSLPNCKAVDIGPGLNLLQEDNPDLIGSEIARWLSTLEISG

SEQ ID NO: 1242 - protein, 277 aa, Synthetic construct
MFHYVDVGPREGTPVLFLHGNPTSSYVWRNIIPHVAPTHRCIAPDLIGMGKSDKPDLGYFFDDHVRFMDAFIEALGLEEVVLVIHDWGSALGFHWAKRNPERVKGIAFMEFIRPIPTWDEWPEFARETFQAFRTTDVGRKLIIDQNVFIEGTLPMGVVRPLTEVEMDHYREPFLNPVDREPLWRFPNELPIAGEPANIVALVEEYMDWLHQSPVPKLLFWGTPGVLIPPAEAARLAKSLPNCKAVDIGPGLNLLQEDNPDLIGSEIARWLSTLEISG

SEQ ID NO: 1243 - protein, 277 aa, Synthetic construct
MFHYVDVGPRNGTPVLFLHGNPTSSYVWRNIIPHVAPTHRCIAPDLIGMGKSDKPDLGYFFDDHVRFMDAFIEALGLEEVVLVIHDWGSALGFHWAKRNPERVKGIAFMEFIRPIPTWDEWPEFARETFQAFRTTDVGRKLIIDQNVFIEGTLPMGVVRPLTEVEMDHYREPFLNPVDREPLWRFPNELPIAGEPANIVALVEEYMDWLHQSPVPKLLFWGTPGVLIPPAEAARLAKSLPNCKAVDIGPGLNLLQEDNPDLIGSEIARWLSTLEISG

SEQ ID NO: 1244 - protein, 277 aa, Synthetic construct
MFHYVDVGPRGGTPVLFLHGNPTSSYVWRNIIPHVAPTHRCIAPDLIGMGKSDKPDLGYFFDDHVRFMDAFIEALGLEEVVLVIHDWGSALGFHWAKRNPERVKGIAFMEFIRPIPTWDEWPEFARETFQAFRTTDVGRKLIIDQNVFIEGTLPMGVVRPLTEVEMDHYREPFLNPVDREPLWRFPNELPIAGEPANIVALVEEYMDWLHQSPVPKLLFWGTPGVLIPPAEAARLAKSLPNCKAVDIGPGLNLLQEDNPDLIGSEIARWLSTLEISG

SEQ ID NO: 1245 - protein, 277 aa, Synthetic construct
MFHYVDVGPRSGTPVLFLHGNPTSSYVWRNIIPHVAPTHRCIAPDLIGMGKSDKPDLGYFFDDHVRFMDAFIEALGLEEVVLVIHDWGSALGFHWAKRNPERVKGIAFMEFIRPIPTWDEWPEFARETFQAFRTTDVGRKLIIDQNVFIEGTLPMGVVRPLTEVEMDHYREPFLNPVDREPLWRFPNELPIAGEPANIVALVEEYMDWLHQSPVPKLLFWGTPGVLIPPAEAARLAKSLPNCKAVDIGPGLNLLQEDNPDLIGSEIARWLSTLEISG

SEQ ID NO: 1246 - protein, 277 aa, Synthetic construct
MFHYVDVGPRTGTPVLFLHGNPTSSYVWRNIIPHVAPTHRCIAPDLIGMGKSDKPDLGYFFDDHVRFMDAFIEALGLEEVVLVIHDWGSALGFHWAKRNPERVKGIAFMEFIRPIPTWDEWPEFARETFQAFRTTDVGRKLIIDQNVFIEGTLPMGVVRPLTEVEMDHYREPFLNPVDREPLWRFPNELPIAGEPANIVALVEEYMDWLHQSPVPKLLFWGTPGVLIPPAEAARLAKSLPNCKAVDIGPGLNLLQEDNPDLIGSEIARWLSTLEISG

SEQ ID NO: 1247 - protein, 277 aa, Synthetic construct
MFHYVDVGPRAGTPVLFLHGNPTSSYVWRNIIPHVAPTHRCIAPDLIGMGKSDKPDLGYFFDDHVRFMDAFIEALGLEEVVLVIHDWGSALGFHWAKRNPERVKGIAFMEFIRPIPTWDEWPEFARETFQAFRTTDVGRKLIIDQNVFIEGTLPMGVVRPLTEVEMDHYREPFLNPVDREPLWRFPNELPIAGEPANIVALVEEYMDWLHQSPVPKLLFWGTPGVLIPPAEAARLAKSLPNCKAVDIGPGLNLLQEDNPDLIGSEIARWLSTLEISG

SEQ ID NO: 1248 - protein, 277 aa, Synthetic construct
MFHYVDVGPRDATPVLFLHGNPTSSYVWRNIIPHVAPTHRCIAPDLIGMGKSDKPDLGYFFDDHVRFMDAFIEALGLEEVVLVIHDWGSALGFHWAKRNPERVKGIAFMEFIRPIPTWDEWPEFARETFQAFRTTDVGRKLIIDQNVFIEGTLPMGVVRPLTEVEMDHYREPFLNPVDREPLWRFPNELPIAGEPANIVALVEEYMDWLHQSPVPKLLFWGTPGVLIPPAEAARLAKSLPNCKAVDIGPGLNLLQEDNPDLIGSEIARWLSTLEISG

SEQ ID NO: 1249 - protein, 277 aa, Synthetic construct
MFHYVDVGPRDSTPVLFLHGNPTSSYVWRNIIPHVAPTHRCIAPDLIGMGKSDKPDLGYFFDDHVRFMDAFIEALGLEEVVLVIHDWGSALGFHWAKRNPERVKGIAFMEFIRPIPTWDEWPEFARETFQAFRTTDVGRKLIIDQNVFIEGTLPMGVVRPLTEVEMDHYREPFLNPVDREPLWRFPNELPIAGEPANIVALVEEYMDWLHQSPVPKLLFWGTPGVLIPPAEAARLAKSLPNCKAVDIGPGLNLLQEDNPDLIGSEIARWLSTLEISG

SEQ ID NO: 1250 - protein, 277 aa, Synthetic construct
MFHYVDVGPRDKTPVLFLHGNPTSSYVWRNIIPHVAPTHRCIAPDLIGMGKSDKPDLGYFFDDHVRFMDAFIEALGLEEVVLVIHDWGSALGFHWAKRNPERVKGIAFMEFIRPIPTWDEWPEFARETFQAFRTTDVGRKLIIDQNVFIEGTLPMGVVRPLTEVEMDHYREPFLNPVDREPLWRFPNELPIAGEPANIVALVEEYMDWLHQSPVPKLLFWGTPGVLIPPAEAARLAKSLPNCKAVDIGPGLNLLQEDNPDLIGSEIARWLSTLEISG

SEQ ID NO: 1251 - protein, 277 aa, Synthetic construct
MFHYVDVGPRDRTPVLFLHGNPTSSYVWRNIIPHVAPTHRCIAPDLIGMGKSDKPDLGYFFDDHVRFMDAFIEALGLEEVVLVIHDWGSALGFHWAKRNPERVKGIAFMEFIRPIPTWDEWPEFARETFQAFRTTDVGRKLIIDQNVFIEGTLPMGVVRPLTEVEMDHYREPFLNPVDREPLWRFPNELPIAGEPANIVALVEEYMDWLHQSPVPKLLFWGTPGVLIPPAEAARLAKSLPNCKAVDIGPGLNLLQEDNPDLIGSEIARWLSTLEISG

SEQ ID NO: 1252 - protein, 277 aa, Synthetic construct
MFHYVDVGPRDTTPVLFLHGNPTSSYVWRNIIPHVAPTHRCIAPDLIGMGKSDKPDLGYFFDDHVRFMDAFIEALGLEEVVLVIHDWGSALGFHWAKRNPERVKGIAFMEFIRPIPTWDEWPEFARETFQAFRTTDVGRKLIIDQNVFIEGTLPMGVVRPLTEVEMDHYREPFLNPVDREPLWRFPNELPIAGEPANIVALVEEYMDWLHQSPVPKLLFWGTPGVLIPPAEAARLAKSLPNCKAVDIGPGLNLLQEDNPDLIGSEIARWLSTLEISG

SEQ ID NO: 1253 - protein, 277 aa, Synthetic construct
MFHYVDVGPRDQTPVLFLHGNPTSSYVWRNIIPHVAPTHRCIAPDLIGMGKSDKPDLGYFFDDHVRFMDAFIEALGLEEVVLVIHDWGSALGFHWAKRNPERVKGIAFMEFIRPIPTWDEWPEFARETFQAFRTTDVGRKLIIDQNVFIEGTLPMGVVRPLTEVEMDHYREPFLNPVDREPLWRFPNELPIAGEPANIVALVEEYMDWLHQSPVPKLLFWGTPGVLIPPAEAARLAKSLPNCKAVDIGPGLNLLQEDNPDLIGSEIARWLSTLEISG

SEQ ID NO: 1254 - protein, 277 aa, Synthetic construct
MFHYVDVGPRDGLPVLFLHGNPTSSYVWRNIIPHVAPTHRCIAPDLIGMGKSDKPDLGYFFDDHVRFMDAFIEALGLEEVVLVIHDWGSALGFHWAKRNPERVKGIAFMEFIRPIPTWDEWPEFARETFQAFRTTDVGRKLIIDQNVFIEGTLPMGVVRPLTEVEMDHYREPFLNPVDREPLWRFPNELPIAGEPANIVALVEEYMDWLHQSPVPKLLFWGTPGVLIPPAEAARLAKSLPNCKAVDIGPGLNLLQEDNPDLIGSEIARWLSTLEISG

SEQ ID NO: 1255 - protein, 277 aa, Synthetic construct
MFHYVDVGPRDGVPVLFLHGNPTSSYVWRNIIPHVAPTHRCIAPDLIGMGKSDKPDLGYFFDDHVRFMDAFIEALGLEEVVLVIHDWGSALGFHWAKRNPERVKGIAFMEFIRPIPTWDEWPEFARETFQAFRTTDVGRKLIIDQNVFIEGTLPMGVVRPLTEVEMDHYREPFLNPVDREPLWRFPNELPIAGEPANIVALVEEYMDWLHQSPVPKLLFWGTPGVLIPPAEAARLAKSLPNCKAVDIGPGLNLLQEDNPDLIGSEIARWLSTLEISG

SEQ ID NO: 1256 - protein, 277 aa, Synthetic construct
MFHYVDVGPRDGAPVLFLHGNPTSSYVWRNIIPHVAPTHRCIAPDLIGMGKSDKPDLGYFFDDHVRFMDAFIEALGLEEVVLVIHDWGSALGFHWAKRNPERVKGIAFMEFIRPIPTWDEWPEFARETFQAFRTTDVGRKLIIDQNVFIEGTLPMGVVRPLTEVEMDHYREPFLNPVDREPLWRFPNELPIAGEPANIVALVEEYMDWLHQSPVPKLLFWGTPGVLIPPAEAARLAKSLPNCKAVDIGPGLNLLQEDNPDLIGSEIARWLSTLEISG

SEQ ID NO: 1257 - protein, 277 aa, Synthetic construct
MFHYVDVGPRDGRPVLFLHGNPTSSYVWRNIIPHVAPTHRCIAPDLIGMGKSDKPDLGYFFDDHVRFMDAFIEALGLEEVVLVIHDWGSALGFHWAKRNPERVKGIAFMEFIRPIPTWDEWPEFARETFQAFRTTDVGRKLIIDQNVFIEGTLPMGVVRPLTEVEMDHYREPFLNPVDREPLWRFPNELPIAGEPANIVALVEEYMDWLHQSPVPKLLFWGTPGVLIPPAEAARLAKSLPNCKAVDIGPGLNLLQEDNPDLIGSEIARWLSTLEISG

SEQ ID NO: 1258 - protein, 277 aa, Synthetic construct
MFHYVDVGPRDGQPVLFLHGNPTSSYVWRNIIPHVAPTHRCIAPDLIGMGKSDKPDLGYFFDDHVRFMDAFIEALGLEEVVLVIHDWGSALGFHWAKRNPERVKGIAFMEFIRPIPTWDEWPEFARETFQAFRTTDVGRKLIIDQNVFIEGTLPMGVVRPLTEVEMDHYREPFLNPVDREPLWRFPNELPIAGEPANIVALVEEYMDWLHQSPVPKLLFWGTPGVLIPPAEAARLAKSLPNCKAVDIGPGLNLLQEDNPDLIGSEIARWLSTLEISG

SEQ ID NO: 1259 - protein, 277 aa, Synthetic construct
MFHYVDVGPRDGPPVLFLHGNPTSSYVWRNIIPHVAPTHRCIAPDLIGMGKSDKPDLGYFFDDHVRFMDAFIEALGLEEVVLVIHDWGSALGFHWAKRNPERVKGIAFMEFIRPIPTWDEWPEFARETFQAFRTTDVGRKLIIDQNVFIEGTLPMGVVRPLTEVEMDHYREPFLNPVDREPLWRFPNELPIAGEPANIVALVEEYMDWLHQSPVPKLLFWGTPGVLIPPAEAARLAKSLPNCKAVDIGPGLNLLQEDNPDLIGSEIARWLSTLEISG

SEQ ID NO: 1260 - protein, 277 aa, Synthetic construct
MFHYVDVGPRDGTAVLFLHGNPTSSYVWRNIIPHVAPTHRCIAPDLIGMGKSDKPDLGYFFDDHVRFMDAFIEALGLEEVVLVIHDWGSALGFHWAKRNPERVKGIAFMEFIRPIPTWDEWPEFARETFQAFRTTDVGRKLIIDQNVFIEGTLPMGVVRPLTEVEMDHYREPFLNPVDREPLWRFPNELPIAGEPANIVALVEEYMDWLHQSPVPKLLFWGTPGVLIPPAEAARLAKSLPNCKAVDIGPGLNLLQEDNPDLIGSEIARWLSTLEISG

SEQ ID NO: 1261 - protein, 277 aa, Synthetic construct
MFHYVDVGPRDGTTVLFLHGNPTSSYVWRNIIPHVAPTHRCIAPDLIGMGKSDKPDLGYFFDDHVRFMDAFIEALGLEEVVLVIHDWGSALGFHWAKRNPERVKGIAFMEFIRPIPTWDEWPEFARETFQAFRTTDVGRKLIIDQNVFIEGTLPMGVVRPLTEVEMDHYREPFLNPVDREPLWRFPNELPIAGEPANIVALVEEYMDWLHQSPVPKLLFWGTPGVLIPPAEAARLAKSLPNCKAVDIGPGLNLLQEDNPDLIGSEIARWLSTLEISG

SEQ ID NO: 1262 - protein, 277 aa, Synthetic construct
MFHYVDVGPRDGTVVLFLHGNPTSSYVWRNIIPHVAPTHRCIAPDLIGMGKSDKPDLGYFFDDHVRFMDAFIEALGLEEVVLVIHDWGSALGFHWAKRNPERVKGIAFMEFIRPIPTWDEWPEFARETFQAFRTTDVGRKLIIDQNVFIEGTLPMGVVRPLTEVEMDHYREPFLNPVDREPLWRFPNELPIAGEPANIVALVEEYMDWLHQSPVPKLLFWGTPGVLIPPAEAARLAKSLPNCKAVDIGPGLNLLQEDNPDLIGSEIARWLSTLEISG

SEQ ID NO: 1263 - protein, 277 aa, Synthetic construct
MFHYVDVGPRDGTSVLFLHGNPTSSYVWRNIIPHVAPTHRCIAPDLIGMGKSDKPDLGYFFDDHVRFMDAFIEALGLEEVVLVIHDWGSALGFHWAKRNPERVKGIAFMEFIRPIPTWDEWPEFARETFQAFRTTDVGRKLIIDQNVFIEGTLPMGVVRPLTEVEMDHYREPFLNPVDREPLWRFPNELPIAGEPANIVALVEEYMDWLHQSPVPKLLFWGTPGVLIPPAEAARLAKSLPNCKAVDIGPGLNLLQEDNPDLIGSEIARWLSTLEISG

SEQ ID NO: 1264 - protein, 277 aa, Synthetic construct
MFHYVDVGPRDGTIVLFLHGNPTSSYVWRNIIPHVAPTHRCIAPDLIGMGKSDKPDLGYFFDDHVRFMDAFIEALGLEEVVLVIHDWGSALGFHWAKRNPERVKGIAFMEFIRPIPTWDEWPEFARETFQAFRTTDVGRKLIIDQNVFIEGTLPMGVVRPLTEVEMDHYREPFLNPVDREPLWRFPNELPIAGEPANIVALVEEYMDWLHQSPVPKLLFWGTPGVLIPPAEAARLAKSLPNCKAVDIGPGLNLLQEDNPDLIGSEIARWLSTLEISG

SEQ ID NO: 1265 - protein, 277 aa, Synthetic construct
MFHYVDVGPRDGTLVLFLHGNPTSSYVWRNIIPHVAPTHRCIAPDLIGMGKSDKPDLGYFFDDHVRFMDAFIEALGLEEVVLVIHDWGSALGFHWAKRNPERVKGIAFMEFIRPIPTWDEWPEFARETFQAFRTTDVGRKLIIDQNVFIEGTLPMGVVRPLTEVEMDHYREPFLNPVDREPLWRFPNELPIAGEPANIVALVEEYMDWLHQSPVPKLLFWGTPGVLIPPAEAARLAKSLPNCKAVDIGPGLNLLQEDNPDLIGSEIARWLSTLEISG

SEQ ID NO: 1266 - protein, 277 aa, Synthetic construct
MFHYVDVGPRDGTPILFLHGNPTSSYVWRNIIPHVAPTHRCIAPDLIGMGKSDKPDLGYFFDDHVRFMDAFIEALGLEEVVLVIHDWGSALGFHWAKRNPERVKGIAFMEFIRPIPTWDEWPEFARETFQAFRTTDVGRKLIIDQNVFIEGTLPMGVVRPLTEVEMDHYREPFLNPVDREPLWRFPNELPIAGEPANIVALVEEYMDWLHQSPVPKLLFWGTPGVLIPPAEAARLAKSLPNCKAVDIGPGLNLLQEDNPDLIGSEIARWLSTLEISG

SEQ ID NO: 1267 - protein, 277 aa, Synthetic construct
MFHYVDVGPRDGTPLLFLHGNPTSSYVWRNIIPHVAPTHRCIAPDLIGMGKSDKPDLGYFFDDHVRFMDAFIEALGLEEVVLVIHDWGSALGFHWAKRNPERVKGIAFMEFIRPIPTWDEWPEFARETFQAFRTTDVGRKLIIDQNVFIEGTLPMGVVRPLTEVEMDHYREPFLNPVDREPLWRFPNELPIAGEPANIVALVEEYMDWLHQSPVPKLLFWGTPGVLIPPAEAARLAKSLPNCKAVDIGPGLNLLQEDNPDLIGSEIARWLSTLEISG

SEQ ID NO: 1268 - protein, 277 aa, Synthetic construct
MFHYVDVGPRDGTPALFLHGNPTSSYVWRNIIPHVAPTHRCIAPDLIGMGKSDKPDLGYFFDDHVRFMDAFIEALGLEEVVLVIHDWGSALGFHWAKRNPERVKGIAFMEFIRPIPTWDEWPEFARETFQAFRTTDVGRKLIIDQNVFIEGTLPMGVVRPLTEVEMDHYREPFLNPVDREPLWRFPNELPIAGEPANIVALVEEYMDWLHQSPVPKLLFWGTPGVLIPPAEAARLAKSLPNCKAVDIGPGLNLLQEDNPDLIGSEIARWLSTLEISG

SEQ ID NO: 1269 - protein, 277 aa, Synthetic construct
MFHYVDVGPRDGTPMLFLHGNPTSSYVWRNIIPHVAPTHRCIAPDLIGMGKSDKPDLGYFFDDHVRFMDAFIEALGLEEVVLVIHDWGSALGFHWAKRNPERVKGIAFMEFIRPIPTWDEWPEFARETFQAFRTTDVGRKLIIDQNVFIEGTLPMGVVRPLTEVEMDHYREPFLNPVDREPLWRFPNELPIAGEPANIVALVEEYMDWLHQSPVPKLLFWGTPGVLIPPAEAARLAKSLPNCKAVDIGPGLNLLQEDNPDLIGSEIARWLSTLEISG

SEQ ID NO: 1270 - protein, 277 aa, Synthetic construct
MFHYVDVGPRDGTPTLFLHGNPTSSYVWRNIIPHVAPTHRCIAPDLIGMGKSDKPDLGYFFDDHVRFMDAFIEALGLEEVVLVIHDWGSALGFHWAKRNPERVKGIAFMEFIRPIPTWDEWPEFARETFQAFRTTDVGRKLIIDQNVFIEGTLPMGVVRPLTEVEMDHYREPFLNPVDREPLWRFPNELPIAGEPANIVALVEEYMDWLHQSPVPKLLFWGTPGVLIPPAEAARLAKSLPNCKAVDIGPGLNLLQEDNPDLIGSEIARWLSTLEISG

SEQ ID NO: 1271 - protein, 277 aa, Synthetic construct
MFHYVDVGPRDGTPFLFLHGNPTSSYVWRNIIPHVAPTHRCIAPDLIGMGKSDKPDLGYFFDDHVRFMDAFIEALGLEEVVLVIHDWGSALGFHWAKRNPERVKGIAFMEFIRPIPTWDEWPEFARETFQAFRTTDVGRKLIIDQNVFIEGTLPMGVVRPLTEVEMDHYREPFLNPVDREPLWRFPNELPIAGEPANIVALVEEYMDWLHQSPVPKLLFWGTPGVLIPPAEAARLAKSLPNCKAVDIGPGLNLLQEDNPDLIGSEIARWLSTLEISG

SEQ ID NO: 1272 - protein, 277 aa, Synthetic construct
MFHYVDVGPRDGTPVVFLHGNPTSSYVWRNIIPHVAPTHRCIAPDLIGMGKSDKPDLGYFFDDHVRFMDAFIEALGLEEVVLVIHDWGSALGFHWAKRNPERVKGIAFMEFIRPIPTWDEWPEFARETFQAFRTTDVGRKLIIDQNVFIEGTLPMGVVRPLTEVEMDHYREPFLNPVDREPLWRFPNELPIAGEPANIVALVEEYMDWLHQSPVPKLLFWGTPGVLIPPAEAARLAKSLPNCKAVDIGPGLNLLQEDNPDLIGSEIARWLSTLEISG

SEQ ID NO: 1273 - protein, 277 aa, Synthetic construct
MFHYVDVGPRDGTPVIFLHGNPTSSYVWRNIIPHVAPTHRCIAPDLIGMGKSDKPDLGYFFDDHVRFMDAFIEALGLEEVVLVIHDWGSALGFHWAKRNPERVKGIAFMEFIRPIPTWDEWPEFARETFQAFRTTDVGRKLIIDQNVFIEGTLPMGVVRPLTEVEMDHYREPFLNPVDREPLWRFPNELPIAGEPANIVALVEEYMDWLHQSPVPKLLFWGTPGVLIPPAEAARLAKSLPNCKAVDIGPGLNLLQEDNPDLIGSEIARWLSTLEISG

SEQ ID NO: 1274 - protein, 277 aa, Synthetic construct
MFHYVDVGPRDGTPVMFLHGNPTSSYVWRNIIPHVAPTHRCIAPDLIGMGKSDKPDLGYFFDDHVRFMDAFIEALGLEEVVLVIHDWGSALGFHWAKRNPERVKGIAFMEFIRPIPTWDEWPEFARETFQAFRTTDVGRKLIIDQNVFIEGTLPMGVVRPLTEVEMDHYREPFLNPVDREPLWRFPNELPIAGEPANIVALVEEYMDWLHQSPVPKLLFWGTPGVLIPPAEAARLAKSLPNCKAVDIGPGLNLLQEDNPDLIGSEIARWLSTLEISG

SEQ ID NO: 1275 - protein, 277 aa, Synthetic construct
MFHYVDVGPRDGTPVFFLHGNPTSSYVWRNIIPHVAPTHRCIAPDLIGMGKSDKPDLGYFFDDHVRFMDAFIEALGLEEVVLVIHDWGSALGFHWAKRNPERVKGIAFMEFIRPIPTWDEWPEFARETFQAFRTTDVGRKLIIDQNVFIEGTLPMGVVRPLTEVEMDHYREPFLNPVDREPLWRFPNELPIAGEPANIVALVEEYMDWLHQSPVPKLLFWGTPGVLIPPAEAARLAKSLPNCKAVDIGPGLNLLQEDNPDLIGSEIARWLSTLEISG

SEQ ID NO: 1276 - protein, 277 aa, Synthetic construct
MFHYVDVGPRDGTPVAFLHGNPTSSYVWRNIIPHVAPTHRCIAPDLIGMGKSDKPDLGYFFDDHVRFMDAFIEALGLEEVVLVIHDWGSALGFHWAKRNPERVKGIAFMEFIRPIPTWDEWPEFARETFQAFRTTDVGRKLIIDQNVFIEGTLPMGVVRPLTEVEMDHYREPFLNPVDREPLWRFPNELPIAGEPANIVALVEEYMDWLHQSPVPKLLFWGTPGVLIPPAEAARLAKSLPNCKAVDIGPGLNLLQEDNPDLIGSEIARWLSTLEISG

SEQ ID NO: 1277 - protein, 277 aa, Synthetic construct
MFHYVDVGPRDGTPVCFLHGNPTSSYVWRNIIPHVAPTHRCIAPDLIGMGKSDKPDLGYFFDDHVRFMDAFIEALGLEEVVLVIHDWGSALGFHWAKRNPERVKGIAFMEFIRPIPTWDEWPEFARETFQAFRTTDVGRKLIIDQNVFIEGTLPMGVVRPLTEVEMDHYREPFLNPVDREPLWRFPNELPIAGEPANIVALVEEYMDWLHQSPVPKLLFWGTPGVLIPPAEAARLAKSLPNCKAVDIGPGLNLLQEDNPDLIGSEIARWLSTLEISG

SEQ ID NO: 1278 - protein, 277 aa, Synthetic construct
MFHYVDVGPRDGTPVLLLHGNPTSSYVWRNIIPHVAPTHRCIAPDLIGMGKSDKPDLGYFFDDHVRFMDAFIEALGLEEVVLVIHDWGSALGFHWAKRNPERVKGIAFMEFIRPIPTWDEWPEFARETFQAFRTTDVGRKLIIDQNVFIEGTLPMGVVRPLTEVEMDHYREPFLNPVDREPLWRFPNELPIAGEPANIVALVEEYMDWLHQSPVPKLLFWGTPGVLIPPAEAARLAKSLPNCKAVDIGPGLNLLQEDNPDLIGSEIARWLSTLEISG

SEQ ID NO: 1279 - protein, 277 aa, Synthetic construct
MFHYVDVGPRDGTPVLMLHGNPTSSYVWRNIIPHVAPTHRCIAPDLIGMGKSDKPDLGYFFDDHVRFMDAFIEALGLEEVVLVIHDWGSALGFHWAKRNPERVKGIAFMEFIRPIPTWDEWPEFARETFQAFRTTDVGRKLIIDQNVFIEGTLPMGVVRPLTEVEMDHYREPFLNPVDREPLWRFPNELPIAGEPANIVALVEEYMDWLHQSPVPKLLFWGTPGVLIPPAEAARLAKSLPNCKAVDIGPGLNLLQEDNPDLIGSEIARWLSTLEISG

SEQ ID NO: 1280 - protein, 277 aa, Synthetic construct
MFHYVDVGPRDGTPVLYLHGNPTSSYVWRNIIPHVAPTHRCIAPDLIGMGKSDKPDLGYFFDDHVRFMDAFIEALGLEEVVLVIHDWGSALGFHWAKRNPERVKGIAFMEFIRPIPTWDEWPEFARETFQAFRTTDVGRKLIIDQNVFIEGTLPMGVVRPLTEVEMDHYREPFLNPVDREPLWRFPNELPIAGEPANIVALVEEYMDWLHQSPVPKLLFWGTPGVLIPPAEAARLAKSLPNCKAVDIGPGLNLLQEDNPDLIGSEIARWLSTLEISG

SEQ ID NO: 1281 - protein, 277 aa, Synthetic construct
MFHYVDVGPRDGTPVLCLHGNPTSSYVWRNIIPHVAPTHRCIAPDLIGMGKSDKPDLGYFFDDHVRFMDAFIEALGLEEVVLVIHDWGSALGFHWAKRNPERVKGIAFMEFIRPIPTWDEWPEFARETFQAFRTTDVGRKLIIDQNVFIEGTLPMGVVRPLTEVEMDHYREPFLNPVDREPLWRFPNELPIAGEPANIVALVEEYMDWLHQSPVPKLLFWGTPGVLIPPAEAARLAKSLPNCKAVDIGPGLNLLQEDNPDLIGSEIARWLSTLEISG

SEQ ID NO: 1282 - protein, 277 aa, Synthetic construct
MFHYVDVGPRDGTPVLWLHGNPTSSYVWRNIIPHVAPTHRCIAPDLIGMGKSDKPDLGYFFDDHVRFMDAFIEALGLEEVVLVIHDWGSALGFHWAKRNPERVKGIAFMEFIRPIPTWDEWPEFARETFQAFRTTDVGRKLIIDQNVFIEGTLPMGVVRPLTEVEMDHYREPFLNPVDREPLWRFPNELPIAGEPANIVALVEEYMDWLHQSPVPKLLFWGTPGVLIPPAEAARLAKSLPNCKAVDIGPGLNLLQEDNPDLIGSEIARWLSTLEISG

SEQ ID NO: 1283 - protein, 277 aa, Synthetic construct
MFHYVDVGPRDGTPVLILHGNPTSSYVWRNIIPHVAPTHRCIAPDLIGMGKSDKPDLGYFFDDHVRFMDAFIEALGLEEVVLVIHDWGSALGFHWAKRNPERVKGIAFMEFIRPIPTWDEWPEFARETFQAFRTTDVGRKLIIDQNVFIEGTLPMGVVRPLTEVEMDHYREPFLNPVDREPLWRFPNELPIAGEPANIVALVEEYMDWLHQSPVPKLLFWGTPGVLIPPAEAARLAKSLPNCKAVDIGPGLNLLQEDNPDLIGSEIARWLSTLEISG

SEQ ID NO: 1284 - protein, 277 aa, Synthetic construct
MFHYVDVGPRDGTPVLFVHGNPTSSYVWRNIIPHVAPTHRCIAPDLIGMGKSDKPDLGYFFDDHVRFMDAFIEALGLEEVVLVIHDWGSALGFHWAKRNPERVKGIAFMEFIRPIPTWDEWPEFARETFQAFRTTDVGRKLIIDQNVFIEGTLPMGVVRPLTEVEMDHYREPFLNPVDREPLWRFPNELPIAGEPANIVALVEEYMDWLHQSPVPKLLFWGTPGVLIPPAEAARLAKSLPNCKAVDIGPGLNLLQEDNPDLIGSEIARWLSTLEISG

SEQ ID NO: 1285 - protein, 277 aa, Synthetic construct
MFHYVDVGPRDGTPVLFMHGNPTSSYVWRNIIPHVAPTHRCIAPDLIGMGKSDKPDLGYFFDDHVRFMDAFIEALGLEEVVLVIHDWGSALGFHWAKRNPERVKGIAFMEFIRPIPTWDEWPEFARETFQAFRTTDVGRKLIIDQNVFIEGTLPMGVVRPLTEVEMDHYREPFLNPVDREPLWRFPNELPIAGEPANIVALVEEYMDWLHQSPVPKLLFWGTPGVLIPPAEAARLAKSLPNCKAVDIGPGLNLLQEDNPDLIGSEIARWLSTLEISG

SEQ ID NO: 1286 - protein, 277 aa, Synthetic construct
MFHYVDVGPRDGTPVLFIHGNPTSSYVWRNIIPHVAPTHRCIAPDLIGMGKSDKPDLGYFFDDHVRFMDAFIEALGLEEVVLVIHDWGSALGFHWAKRNPERVKGIAFMEFIRPIPTWDEWPEFARETFQAFRTTDVGRKLIIDQNVFIEGTLPMGVVRPLTEVEMDHYREPFLNPVDREPLWRFPNELPIAGEPANIVALVEEYMDWLHQSPVPKLLFWGTPGVLIPPAEAARLAKSLPNCKAVDIGPGLNLLQEDNPDLIGSEIARWLSTLEISG

SEQ ID NO: 1287 - protein, 277 aa, Synthetic construct
MFHYVDVGPRDGTPVLFFHGNPTSSYVWRNIIPHVAPTHRCIAPDLIGMGKSDKPDLGYFFDDHVRFMDAFIEALGLEEVVLVIHDWGSALGFHWAKRNPERVKGIAFMEFIRPIPTWDEWPEFARETFQAFRTTDVGRKLIIDQNVFIEGTLPMGVVRPLTEVEMDHYREPFLNPVDREPLWRFPNELPIAGEPANIVALVEEYMDWLHQSPVPKLLFWGTPGVLIPPAEAARLAKSLPNCKAVDIGPGLNLLQEDNPDLIGSEIARWLSTLEISG

SEQ ID NO: 1288 - protein, 277 aa, Synthetic construct
MFHYVDVGPRDGTPVLFQHGNPTSSYVWRNIIPHVAPTHRCIAPDLIGMGKSDKPDLGYFFDDHVRFMDAFIEALGLEEVVLVIHDWGSALGFHWAKRNPERVKGIAFMEFIRPIPTWDEWPEFARETFQAFRTTDVGRKLIIDQNVFIEGTLPMGVVRPLTEVEMDHYREPFLNPVDREPLWRFPNELPIAGEPANIVALVEEYMDWLHQSPVPKLLFWGTPGVLIPPAEAARLAKSLPNCKAVDIGPGLNLLQEDNPDLIGSEIARWLSTLEISG

SEQ ID NO: 1289 - protein, 277 aa, Synthetic construct
MFHYVDVGPRDGTPVLFCHGNPTSSYVWRNIIPHVAPTHRCIAPDLIGMGKSDKPDLGYFFDDHVRFMDAFIEALGLEEVVLVIHDWGSALGFHWAKRNPERVKGIAFMEFIRPIPTWDEWPEFARETFQAFRTTDVGRKLIIDQNVFIEGTLPMGVVRPLTEVEMDHYREPFLNPVDREPLWRFPNELPIAGEPANIVALVEEYMDWLHQSPVPKLLFWGTPGVLIPPAEAARLAKSLPNCKAVDIGPGLNLLQEDNPDLIGSEIARWLSTLEISG

SEQ ID NO: 1290 - protein, 277 aa, Synthetic construct
MFHYVDVGPRDGTPVLFLNGNPTSSYVWRNIIPHVAPTHRCIAPDLIGMGKSDKPDLGYFFDDHVRFMDAFIEALGLEEVVLVIHDWGSALGFHWAKRNPERVKGIAFMEFIRPIPTWDEWPEFARETFQAFRTTDVGRKLIIDQNVFIEGTLPMGVVRPLTEVEMDHYREPFLNPVDREPLWRFPNELPIAGEPANIVALVEEYMDWLHQSPVPKLLFWGTPGVLIPPAEAARLAKSLPNCKAVDIGPGLNLLQEDNPDLIGSEIARWLSTLEISG

SEQ ID NO: 1291 - protein, 277 aa, Synthetic construct
MFHYVDVGPRDGTPVLFLQGNPTSSYVWRNIIPHVAPTHRCIAPDLIGMGKSDKPDLGYFFDDHVRFMDAFIEALGLEEVVLVIHDWGSALGFHWAKRNPERVKGIAFMEFIRPIPTWDEWPEFARETFQAFRTTDVGRKLIIDQNVFIEGTLPMGVVRPLTEVEMDHYREPFLNPVDREPLWRFPNELPIAGEPANIVALVEEYMDWLHQSPVPKLLFWGTPGVLIPPAEAARLAKSLPNCKAVDIGPGLNLLQEDNPDLIGSEIARWLSTLEISG

SEQ ID NO: 1292 - protein, 277 aa, Synthetic construct
MFHYVDVGPRDGTPVLFLSGNPTSSYVWRNIIPHVAPTHRCIAPDLIGMGKSDKPDLGYFFDDHVRFMDAFIEALGLEEVVLVIHDWGSALGFHWAKRNPERVKGIAFMEFIRPIPTWDEWPEFARETFQAFRTTDVGRKLIIDQNVFIEGTLPMGVVRPLTEVEMDHYREPFLNPVDREPLWRFPNELPIAGEPANIVALVEEYMDWLHQSPVPKLLFWGTPGVLIPPAEAARLAKSLPNCKAVDIGPGLNLLQEDNPDLIGSEIARWLSTLEISG

SEQ ID NO: 1293 - protein, 277 aa, Synthetic construct
MFHYVDVGPRDGTPVLFLPGNPTSSYVWRNIIPHVAPTHRCIAPDLIGMGKSDKPDLGYFFDDHVRFMDAFIEALGLEEVVLVIHDWGSALGFHWAKRNPERVKGIAFMEFIRPIPTWDEWPEFARETFQAFRTTDVGRKLIIDQNVFIEGTLPMGVVRPLTEVEMDHYREPFLNPVDREPLWRFPNELPIAGEPANIVALVEEYMDWLHQSPVPKLLFWGTPGVLIPPAEAARLAKSLPNCKAVDIGPGLNLLQEDNPDLIGSEIARWLSTLEISG

SEQ ID NO: 1294 - protein, 277 aa, Synthetic construct
MFHYVDVGPRDGTPVLFLYGNPTSSYVWRNIIPHVAPTHRCIAPDLIGMGKSDKPDLGYFFDDHVRFMDAFIEALGLEEVVLVIHDWGSALGFHWAKRNPERVKGIAFMEFIRPIPTWDEWPEFARETFQAFRTTDVGRKLIIDQNVFIEGTLPMGVVRPLTEVEMDHYREPFLNPVDREPLWRFPNELPIAGEPANIVALVEEYMDWLHQSPVPKLLFWGTPGVLIPPAEAARLAKSLPNCKAVDIGPGLNLLQEDNPDLIGSEIARWLSTLEISG

SEQ ID NO: 1295 - protein, 277 aa, Synthetic construct
MFHYVDVGPRDGTPVLFLAGNPTSSYVWRNIIPHVAPTHRCIAPDLIGMGKSDKPDLGYFFDDHVRFMDAFIEALGLEEVVLVIHDWGSALGFHWAKRNPERVKGIAFMEFIRPIPTWDEWPEFARETFQAFRTTDVGRKLIIDQNVFIEGTLPMGVVRPLTEVEMDHYREPFLNPVDREPLWRFPNELPIAGEPANIVALVEEYMDWLHQSPVPKLLFWGTPGVLIPPAEAARLAKSLPNCKAVDIGPGLNLLQEDNPDLIGSEIARWLSTLEISG

SEQ ID NO: 1296 - protein, 277 aa, Synthetic construct
MFHYVDVGPRDGTPVLFLHANPTSSYVWRNIIPHVAPTHRCIAPDLIGMGKSDKPDLGYFFDDHVRFMDAFIEALGLEEVVLVIHDWGSALGFHWAKRNPERVKGIAFMEFIRPIPTWDEWPEFARETFQAFRTTDVGRKLIIDQNVFIEGTLPMGVVRPLTEVEMDHYREPFLNPVDREPLWRFPNELPIAGEPANIVALVEEYMDWLHQSPVPKLLFWGTPGVLIPPAEAARLAKSLPNCKAVDIGPGLNLLQEDNPDLIGSEIARWLSTLEISG

SEQ ID NO: 1297 - protein, 277 aa, Synthetic construct
MFHYVDVGPRDGTPVLFLHSNPTSSYVWRNIIPHVAPTHRCIAPDLIGMGKSDKPDLGYFFDDHVRFMDAFIEALGLEEVVLVIHDWGSALGFHWAKRNPERVKGIAFMEFIRPIPTWDEWPEFARETFQAFRTTDVGRKLIIDQNVFIEGTLPMGVVRPLTEVEMDHYREPFLNPVDREPLWRFPNELPIAGEPANIVALVEEYMDWLHQSPVPKLLFWGTPGVLIPPAEAARLAKSLPNCKAVDIGPGLNLLQEDNPDLIGSEIARWLSTLEISG

SEQ ID NO: 1298 - protein, 277 aa, Synthetic construct
MFHYVDVGPRDGTPVLFLHCNPTSSYVWRNIIPHVAPTHRCIAPDLIGMGKSDKPDLGYFFDDHVRFMDAFIEALGLEEVVLVIHDWGSALGFHWAKRNPERVKGIAFMEFIRPIPTWDEWPEFARETFQAFRTTDVGRKLIIDQNVFIEGTLPMGVVRPLTEVEMDHYREPFLNPVDREPLWRFPNELPIAGEPANIVALVEEYMDWLHQSPVPKLLFWGTPGVLIPPAEAARLAKSLPNCKAVDIGPGLNLLQEDNPDLIGSEIARWLSTLEISG

SEQ ID NO: 1299 - protein, 277 aa, Synthetic construct
MFHYVDVGPRDGTPVLFLHDNPTSSYVWRNIIPHVAPTHRCIAPDLIGMGKSDKPDLGYFFDDHVRFMDAFIEALGLEEVVLVIHDWGSALGFHWAKRNPERVKGIAFMEFIRPIPTWDEWPEFARETFQAFRTTDVGRKLIIDQNVFIEGTLPMGVVRPLTEVEMDHYREPFLNPVDREPLWRFPNELPIAGEPANIVALVEEYMDWLHQSPVPKLLFWGTPGVLIPPAEAARLAKSLPNCKAVDIGPGLNLLQEDNPDLIGSEIARWLSTLEISG

SEQ ID NO: 1300 - protein, 277 aa, Synthetic construct
MFHYVDVGPRDGTPVLFLHPNPTSSYVWRNIIPHVAPTHRCIAPDLIGMGKSDKPDLGYFFDDHVRFMDAFIEALGLEEVVLVIHDWGSALGFHWAKRNPERVKGIAFMEFIRPIPTWDEWPEFARETFQAFRTTDVGRKLIIDQNVFIEGTLPMGVVRPLTEVEMDHYREPFLNPVDREPLWRFPNELPIAGEPANIVALVEEYMDWLHQSPVPKLLFWGTPGVLIPPAEAARLAKSLPNCKAVDIGPGLNLLQEDNPDLIGSEIARWLSTLEISG

SEQ ID NO: 1301 - protein, 277 aa, Synthetic construct
MFHYVDVGPRDGTPVLFLHVNPTSSYVWRNIIPHVAPTHRCIAPDLIGMGKSDKPDLGYFFDDHVRFMDAFIEALGLEEVVLVIHDWGSALGFHWAKRNPERVKGIAFMEFIRPIPTWDEWPEFARETFQAFRTTDVGRKLIIDQNVFIEGTLPMGVVRPLTEVEMDHYREPFLNPVDREPLWRFPNELPIAGEPANIVALVEEYMDWLHQSPVPKLLFWGTPGVLIPPAEAARLAKSLPNCKAVDIGPGLNLLQEDNPDLIGSEIARWLSTLEISG

SEQ ID NO: 1302 - protein, 277 aa, Synthetic construct
MFHYVDVGPRDGTPVLFLHGTPTSSYVWRNIIPHVAPTHRCIAPDLIGMGKSDKPDLGYFFDDHVRFMDAFIEALGLEEVVLVIHDWGSALGFHWAKRNPERVKGIAFMEFIRPIPTWDEWPEFARETFQAFRTTDVGRKLIIDQNVFIEGTLPMGVVRPLTEVEMDHYREPFLNPVDREPLWRFPNELPIAGEPANIVALVEEYMDWLHQSPVPKLLFWGTPGVLIPPAEAARLAKSLPNCKAVDIGPGLNLLQEDNPDLIGSEIARWLSTLEISG

SEQ ID NO: 1303 - protein, 277 aa, Synthetic construct
MFHYVDVGPRDGTPVLFLHGSPTSSYVWRNIIPHVAPTHRCIAPDLIGMGKSDKPDLGYFFDDHVRFMDAFIEALGLEEVVLVIHDWGSALGFHWAKRNPERVKGIAFMEFIRPIPTWDEWPEFARETFQAFRTTDVGRKLIIDQNVFIEGTLPMGVVRPLTEVEMDHYREPFLNPVDREPLWRFPNELPIAGEPANIVALVEEYMDWLHQSPVPKLLFWGTPGVLIPPAEAARLAKSLPNCKAVDIGPGLNLLQEDNPDLIGSEIARWLSTLEISG

SEQ ID NO: 1304 - protein, 277 aa, Synthetic construct
MFHYVDVGPRDGTPVLFLHGVPTSSYVWRNIIPHVAPTHRCIAPDLIGMGKSDKPDLGYFFDDHVRFMDAFIEALGLEEVVLVIHDWGSALGFHWAKRNPERVKGIAFMEFIRPIPTWDEWPEFARETFQAFRTTDVGRKLIIDQNVFIEGTLPMGVVRPLTEVEMDHYREPFLNPVDREPLWRFPNELPIAGEPANIVALVEEYMDWLHQSPVPKLLFWGTPGVLIPPAEAARLAKSLPNCKAVDIGPGLNLLQEDNPDLIGSEIARWLSTLEISG

SEQ ID NO: 1305 - protein, 277 aa, Synthetic construct
MFHYVDVGPRDGTPVLFLHGQPTSSYVWRNIIPHVAPTHRCIAPDLIGMGKSDKPDLGYFFDDHVRFMDAFIEALGLEEVVLVIHDWGSALGFHWAKRNPERVKGIAFMEFIRPIPTWDEWPEFARETFQAFRTTDVGRKLIIDQNVFIEGTLPMGVVRPLTEVEMDHYREPFLNPVDREPLWRFPNELPIAGEPANIVALVEEYMDWLHQSPVPKLLFWGTPGVLIPPAEAARLAKSLPNCKAVDIGPGLNLLQEDNPDLIGSEIARWLSTLEISG

SEQ ID NO: 1306 - protein, 277 aa, Synthetic construct
MFHYVDVGPRDGTPVLFLHGAPTSSYVWRNIIPHVAPTHRCIAPDLIGMGKSDKPDLGYFFDDHVRFMDAFIEALGLEEVVLVIHDWGSALGFHWAKRNPERVKGIAFMEFIRPIPTWDEWPEFARETFQAFRTTDVGRKLIIDQNVFIEGTLPMGVVRPLTEVEMDHYREPFLNPVDREPLWRFPNELPIAGEPANIVALVEEYMDWLHQSPVPKLLFWGTPGVLIPPAEAARLAKSLPNCKAVDIGPGLNLLQEDNPDLIGSEIARWLSTLEISG

SEQ ID NO: 1307 - protein, 277 aa, Synthetic construct
MFHYVDVGPRDGTPVLFLHGIPTSSYVWRNIIPHVAPTHRCIAPDLIGMGKSDKPDLGYFFDDHVRFMDAFIEALGLEEVVLVIHDWGSALGFHWAKRNPERVKGIAFMEFIRPIPTWDEWPEFARETFQAFRTTDVGRKLIIDQNVFIEGTLPMGVVRPLTEVEMDHYREPFLNPVDREPLWRFPNELPIAGEPANIVALVEEYMDWLHQSPVPKLLFWGTPGVLIPPAEAARLAKSLPNCKAVDIGPGLNLLQEDNPDLIGSEIARWLSTLEISG

SEQ ID NO: 1308 - protein, 277 aa, Synthetic construct
MFHYVDVGPRDGTPVLFLHGNATSSYVWRNIIPHVAPTHRCIAPDLIGMGKSDKPDLGYFFDDHVRFMDAFIEALGLEEVVLVIHDWGSALGFHWAKRNPERVKGIAFMEFIRPIPTWDEWPEFARETFQAFRTTDVGRKLIIDQNVFIEGTLPMGVVRPLTEVEMDHYREPFLNPVDREPLWRFPNELPIAGEPANIVALVEEYMDWLHQSPVPKLLFWGTPGVLIPPAEAARLAKSLPNCKAVDIGPGLNLLQEDNPDLIGSEIARWLSTLEISG

SEQ ID NO: 1309 - protein, 277 aa, Synthetic construct
MFHYVDVGPRDGTPVLFLHGNSTSSYVWRNIIPHVAPTHRCIAPDLIGMGKSDKPDLGYFFDDHVRFMDAFIEALGLEEVVLVIHDWGSALGFHWAKRNPERVKGIAFMEFIRPIPTWDEWPEFARETFQAFRTTDVGRKLIIDQNVFIEGTLPMGVVRPLTEVEMDHYREPFLNPVDREPLWRFPNELPIAGEPANIVALVEEYMDWLHQSPVPKLLFWGTPGVLIPPAEAARLAKSLPNCKAVDIGPGLNLLQEDNPDLIGSEIARWLSTLEISG

SEQ ID NO: 1310 - protein, 277 aa, Synthetic construct
MFHYVDVGPRDGTPVLFLHGNLTSSYVWRNIIPHVAPTHRCIAPDLIGMGKSDKPDLGYFFDDHVRFMDAFIEALGLEEVVLVIHDWGSALGFHWAKRNPERVKGIAFMEFIRPIPTWDEWPEFARETFQAFRTTDVGRKLIIDQNVFIEGTLPMGVVRPLTEVEMDHYREPFLNPVDREPLWRFPNELPIAGEPANIVALVEEYMDWLHQSPVPKLLFWGTPGVLIPPAEAARLAKSLPNCKAVDIGPGLNLLQEDNPDLIGSEIARWLSTLEISG

SEQ ID NO: 1311 - protein, 277 aa, Synthetic construct
MFHYVDVGPRDGTPVLFLHGNTTSSYVWRNIIPHVAPTHRCIAPDLIGMGKSDKPDLGYFFDDHVRFMDAFIEALGLEEVVLVIHDWGSALGFHWAKRNPERVKGIAFMEFIRPIPTWDEWPEFARETFQAFRTTDVGRKLIIDQNVFIEGTLPMGVVRPLTEVEMDHYREPFLNPVDREPLWRFPNELPIAGEPANIVALVEEYMDWLHQSPVPKLLFWGTPGVLIPPAEAARLAKSLPNCKAVDIGPGLNLLQEDNPDLIGSEIARWLSTLEISG

SEQ ID NO: 1312 - protein, 277 aa, Synthetic construct
MFHYVDVGPRDGTPVLFLHGNVTSSYVWRNIIPHVAPTHRCIAPDLIGMGKSDKPDLGYFFDDHVRFMDAFIEALGLEEVVLVIHDWGSALGFHWAKRNPERVKGIAFMEFIRPIPTWDEWPEFARETFQAFRTTDVGRKLIIDQNVFIEGTLPMGVVRPLTEVEMDHYREPFLNPVDREPLWRFPNELPIAGEPANIVALVEEYMDWLHQSPVPKLLFWGTPGVLIPPAEAARLAKSLPNCKAVDIGPGLNLLQEDNPDLIGSEIARWLSTLEISG

SEQ ID NO: 1313 - protein, 277 aa, Synthetic construct
MFHYVDVGPRDGTPVLFLHGNGTSSYVWRNIIPHVAPTHRCIAPDLIGMGKSDKPDLGYFFDDHVRFMDAFIEALGLEEVVLVIHDWGSALGFHWAKRNPERVKGIAFMEFIRPIPTWDEWPEFARETFQAFRTTDVGRKLIIDQNVFIEGTLPMGVVRPLTEVEMDHYREPFLNPVDREPLWRFPNELPIAGEPANIVALVEEYMDWLHQSPVPKLLFWGTPGVLIPPAEAARLAKSLPNCKAVDIGPGLNLLQEDNPDLIGSEIARWLSTLEISG

SEQ ID NO: 1314 - protein, 277 aa, Synthetic construct
MFHYVDVGPRDGTPVLFLHGNPASSYVWRNIIPHVAPTHRCIAPDLIGMGKSDKPDLGYFFDDHVRFMDAFIEALGLEEVVLVIHDWGSALGFHWAKRNPERVKGIAFMEFIRPIPTWDEWPEFARETFQAFRTTDVGRKLIIDQNVFIEGTLPMGVVRPLTEVEMDHYREPFLNPVDREPLWRFPNELPIAGEPANIVALVEEYMDWLHQSPVPKLLFWGTPGVLIPPAEAARLAKSLPNCKAVDIGPGLNLLQEDNPDLIGSEIARWLSTLEISG

SEQ ID NO: 1315 - protein, 277 aa, Synthetic construct
MFHYVDVGPRDGTPVLFLHGNPSSSYVWRNIIPHVAPTHRCIAPDLIGMGKSDKPDLGYFFDDHVRFMDAFIEALGLEEVVLVIHDWGSALGFHWAKRNPERVKGIAFMEFIRPIPTWDEWPEFARETFQAFRTTDVGRKLIIDQNVFIEGTLPMGVVRPLTEVEMDHYREPFLNPVDREPLWRFPNELPIAGEPANIVALVEEYMDWLHQSPVPKLLFWGTPGVLIPPAEAARLAKSLPNCKAVDIGPGLNLLQEDNPDLIGSEIARWLSTLEISG

SEQ ID NO: 1316 - protein, 277 aa, Synthetic construct
MFHYVDVGPRDGTPVLFLHGNPVSSYVWRNIIPHVAPTHRCIAPDLIGMGKSDKPDLGYFFDDHVRFMDAFIEALGLEEVVLVIHDWGSALGFHWAKRNPERVKGIAFMEFIRPIPTWDEWPEFARETFQAFRTTDVGRKLIIDQNVFIEGTLPMGVVRPLTEVEMDHYREPFLNPVDREPLWRFPNELPIAGEPANIVALVEEYMDWLHQSPVPKLLFWGTPGVLIPPAEAARLAKSLPNCKAVDIGPGLNLLQEDNPDLIGSEIARWLSTLEISG

SEQ ID NO: 1317 - protein, 277 aa, Synthetic construct
MFHYVDVGPRDGTPVLFLHGNPGSSYVWRNIIPHVAPTHRCIAPDLIGMGKSDKPDLGYFFDDHVRFMDAFIEALGLEEVVLVIHDWGSALGFHWAKRNPERVKGIAFMEFIRPIPTWDEWPEFARETFQAFRTTDVGRKLIIDQNVFIEGTLPMGVVRPLTEVEMDHYREPFLNPVDREPLWRFPNELPIAGEPANIVALVEEYMDWLHQSPVPKLLFWGTPGVLIPPAEAARLAKSLPNCKAVDIGPGLNLLQEDNPDLIGSEIARWLSTLEISG

SEQ ID NO: 1318 - protein, 277 aa, Synthetic construct
MFHYVDVGPRDGTPVLFLHGNPNSSYVWRNIIPHVAPTHRCIAPDLIGMGKSDKPDLGYFFDDHVRFMDAFIEALGLEEVVLVIHDWGSALGFHWAKRNPERVKGIAFMEFIRPIPTWDEWPEFARETFQAFRTTDVGRKLIIDQNVFIEGTLPMGVVRPLTEVEMDHYREPFLNPVDREPLWRFPNELPIAGEPANIVALVEEYMDWLHQSPVPKLLFWGTPGVLIPPAEAARLAKSLPNCKAVDIGPGLNLLQEDNPDLIGSEIARWLSTLEISG

SEQ ID NO: 1319 - protein, 277 aa, Synthetic construct
MFHYVDVGPRDGTPVLFLHGNPMSSYVWRNIIPHVAPTHRCIAPDLIGMGKSDKPDLGYFFDDHVRFMDAFIEALGLEEVVLVIHDWGSALGFHWAKRNPERVKGIAFMEFIRPIPTWDEWPEFARETFQAFRTTDVGRKLIIDQNVFIEGTLPMGVVRPLTEVEMDHYREPFLNPVDREPLWRFPNELPIAGEPANIVALVEEYMDWLHQSPVPKLLFWGTPGVLIPPAEAARLAKSLPNCKAVDIGPGLNLLQEDNPDLIGSEIARWLSTLEISG

SEQ ID NO: 1320 - protein, 277 aa, Synthetic construct
MFHYVDVGPRDGTPVLFLHGNPTASYVWRNIIPHVAPTHRCIAPDLIGMGKSDKPDLGYFFDDHVRFMDAFIEALGLEEVVLVIHDWGSALGFHWAKRNPERVKGIAFMEFIRPIPTWDEWPEFARETFQAFRTTDVGRKLIIDQNVFIEGTLPMGVVRPLTEVEMDHYREPFLNPVDREPLWRFPNELPIAGEPANIVALVEEYMDWLHQSPVPKLLFWGTPGVLIPPAEAARLAKSLPNCKAVDIGPGLNLLQEDNPDLIGSEIARWLSTLEISG

SEQ ID NO: 1321 - protein, 277 aa, Synthetic construct
MFHYVDVGPRDGTPVLFLHGNPTTSYVWRNIIPHVAPTHRCIAPDLIGMGKSDKPDLGYFFDDHVRFMDAFIEALGLEEVVLVIHDWGSALGFHWAKRNPERVKGIAFMEFIRPIPTWDEWPEFARETFQAFRTTDVGRKLIIDQNVFIEGTLPMGVVRPLTEVEMDHYREPFLNPVDREPLWRFPNELPIAGEPANIVALVEEYMDWLHQSPVPKLLFWGTPGVLIPPAEAARLAKSLPNCKAVDIGPGLNLLQEDNPDLIGSEIARWLSTLEISG

SEQ ID NO: 1322 - protein, 277 aa, Synthetic construct
MFHYVDVGPRDGTPVLFLHGNPTWSYVWRNIIPHVAPTHRCIAPDLIGMGKSDKPDLGYFFDDHVRFMDAFIEALGLEEVVLVIHDWGSALGFHWAKRNPERVKGIAFMEFIRPIPTWDEWPEFARETFQAFRTTDVGRKLIIDQNVFIEGTLPMGVVRPLTEVEMDHYREPFLNPVDREPLWRFPNELPIAGEPANIVALVEEYMDWLHQSPVPKLLFWGTPGVLIPPAEAARLAKSLPNCKAVDIGPGLNLLQEDNPDLIGSEIARWLSTLEISG

SEQ ID NO: 1323 - protein, 277 aa, Synthetic construct
MFHYVDVGPRDGTPVLFLHGNPTCSYVWRNIIPHVAPTHRCIAPDLIGMGKSDKPDLGYFFDDHVRFMDAFIEALGLEEVVLVIHDWGSALGFHWAKRNPERVKGIAFMEFIRPIPTWDEWPEFARETFQAFRTTDVGRKLIIDQNVFIEGTLPMGVVRPLTEVEMDHYREPFLNPVDREPLWRFPNELPIAGEPANIVALVEEYMDWLHQSPVPKLLFWGTPGVLIPPAEAARLAKSLPNCKAVDIGPGLNLLQEDNPDLIGSEIARWLSTLEISG

SEQ ID NO: 1324 - protein, 277 aa, Synthetic construct
MFHYVDVGPRDGTPVLFLHGNPTGSYVWRNIIPHVAPTHRCIAPDLIGMGKSDKPDLGYFFDDHVRFMDAFIEALGLEEVVLVIHDWGSALGFHWAKRNPERVKGIAFMEFIRPIPTWDEWPEFARETFQAFRTTDVGRKLIIDQNVFIEGTLPMGVVRPLTEVEMDHYREPFLNPVDREPLWRFPNELPIAGEPANIVALVEEYMDWLHQSPVPKLLFWGTPGVLIPPAEAARLAKSLPNCKAVDIGPGLNLLQEDNPDLIGSEIARWLSTLEISG

SEQ ID NO: 1325 - protein, 277 aa, Synthetic construct
MFHYVDVGPRDGTPVLFLHGNPTNSYVWRNIIPHVAPTHRCIAPDLIGMGKSDKPDLGYFFDDHVRFMDAFIEALGLEEVVLVIHDWGSALGFHWAKRNPERVKGIAFMEFIRPIPTWDEWPEFARETFQAFRTTDVGRKLIIDQNVFIEGTLPMGVVRPLTEVEMDHYREPFLNPVDREPLWRFPNELPIAGEPANIVALVEEYMDWLHQSPVPKLLFWGTPGVLIPPAEAARLAKSLPNCKAVDIGPGLNLLQEDNPDLIGSEIARWLSTLEISG

SEQ ID NO: 1326 - protein, 277 aa, Synthetic construct
MFHYVDVGPRDGTPVLFLHGNPTSAYVWRNIIPHVAPTHRCIAPDLIGMGKSDKPDLGYFFDDHVRFMDAFIEALGLEEVVLVIHDWGSALGFHWAKRNPERVKGIAFMEFIRPIPTWDEWPEFARETFQAFRTTDVGRKLIIDQNVFIEGTLPMGVVRPLTEVEMDHYREPFLNPVDREPLWRFPNELPIAGEPANIVALVEEYMDWLHQSPVPKLLFWGTPGVLIPPAEAARLAKSLPNCKAVDIGPGLNLLQEDNPDLIGSEIARWLSTLEISG

SEQ ID NO: 1327 - protein, 277 aa, Synthetic construct
MFHYVDVGPRDGTPVLFLHGNPTSGYVWRNIIPHVAPTHRCIAPDLIGMGKSDKPDLGYFFDDHVRFMDAFIEALGLEEVVLVIHDWGSALGFHWAKRNPERVKGIAFMEFIRPIPTWDEWPEFARETFQAFRTTDVGRKLIIDQNVFIEGTLPMGVVRPLTEVEMDHYREPFLNPVDREPLWRFPNELPIAGEPANIVALVEEYMDWLHQSPVPKLLFWGTPGVLIPPAEAARLAKSLPNCKAVDIGPGLNLLQEDNPDLIGSEIARWLSTLEISG

SEQ ID NO: 1328 - protein, 277 aa, Synthetic construct
MFHYVDVGPRDGTPVLFLHGNPTSTYVWRNIIPHVAPTHRCIAPDLIGMGKSDKPDLGYFFDDHVRFMDAFIEALGLEEVVLVIHDWGSALGFHWAKRNPERVKGIAFMEFIRPIPTWDEWPEFARETFQAFRTTDVGRKLIIDQNVFIEGTLPMGVVRPLTEVEMDHYREPFLNPVDREPLWRFPNELPIAGEPANIVALVEEYMDWLHQSPVPKLLFWGTPGVLIPPAEAARLAKSLPNCKAVDIGPGLNLLQEDNPDLIGSEIARWLSTLEISG

SEQ ID NO: 1329 - protein, 277 aa, Synthetic construct
MFHYVDVGPRDGTPVLFLHGNPTSCYVWRNIIPHVAPTHRCIAPDLIGMGKSDKPDLGYFFDDHVRFMDAFIEALGLEEVVLVIHDWGSALGFHWAKRNPERVKGIAFMEFIRPIPTWDEWPEFARETFQAFRTTDVGRKLIIDQNVFIEGTLPMGVVRPLTEVEMDHYREPFLNPVDREPLWRFPNELPIAGEPANIVALVEEYMDWLHQSPVPKLLFWGTPGVLIPPAEAARLAKSLPNCKAVDIGPGLNLLQEDNPDLIGSEIARWLSTLEISG

SEQ ID NO: 1330 - protein, 277 aa, Synthetic construct
MFHYVDVGPRDGTPVLFLHGNPTSNYVWRNIIPHVAPTHRCIAPDLIGMGKSDKPDLGYFFDDHVRFMDAFIEALGLEEVVLVIHDWGSALGFHWAKRNPERVKGIAFMEFIRPIPTWDEWPEFARETFQAFRTTDVGRKLIIDQNVFIEGTLPMGVVRPLTEVEMDHYREPFLNPVDREPLWRFPNELPIAGEPANIVALVEEYMDWLHQSPVPKLLFWGTPGVLIPPAEAARLAKSLPNCKAVDIGPGLNLLQEDNPDLIGSEIARWLSTLEISG

SEQ ID NO: 1331 - protein, 277 aa, Synthetic construct
MFHYVDVGPRDGTPVLFLHGNPTSPYVWRNIIPHVAPTHRCIAPDLIGMGKSDKPDLGYFFDDHVRFMDAFIEALGLEEVVLVIHDWGSALGFHWAKRNPERVKGIAFMEFIRPIPTWDEWPEFARETFQAFRTTDVGRKLIIDQNVFIEGTLPMGVVRPLTEVEMDHYREPFLNPVDREPLWRFPNELPIAGEPANIVALVEEYMDWLHQSPVPKLLFWGTPGVLIPPAEAARLAKSLPNCKAVDIGPGLNLLQEDNPDLIGSEIARWLSTLEISG

SEQ ID NO: 1332 - protein, 277 aa, Synthetic construct
MFHYVDVGPRDGTPVLFLHGNPTSSFVWRNIIPHVAPTHRCIAPDLIGMGKSDKPDLGYFFDDHVRFMDAFIEALGLEEVVLVIHDWGSALGFHWAKRNPERVKGIAFMEFIRPIPTWDEWPEFARETFQAFRTTDVGRKLIIDQNVFIEGTLPMGVVRPLTEVEMDHYREPFLNPVDREPLWRFPNELPIAGEPANIVALVEEYMDWLHQSPVPKLLFWGTPGVLIPPAEAARLAKSLPNCKAVDIGPGLNLLQEDNPDLIGSEIARWLSTLEISG

SEQ ID NO: 1333 - protein, 277 aa, Synthetic construct
MFHYVDVGPRDGTPVLFLHGNPTSSHVWRNIIPHVAPTHRCIAPDLIGMGKSDKPDLGYFFDDHVRFMDAFIEALGLEEVVLVIHDWGSALGFHWAKRNPERVKGIAFMEFIRPIPTWDEWPEFARETFQAFRTTDVGRKLIIDQNVFIEGTLPMGVVRPLTEVEMDHYREPFLNPVDREPLWRFPNELPIAGEPANIVALVEEYMDWLHQSPVPKLLFWGTPGVLIPPAEAARLAKSLPNCKAVDIGPGLNLLQEDNPDLIGSEIARWLSTLEISG

SEQ ID NO: 1334 - protein, 277 aa, Synthetic construct
MFHYVDVGPRDGTPVLFLHGNPTSSLVWRNIIPHVAPTHRCIAPDLIGMGKSDKPDLGYFFDDHVRFMDAFIEALGLEEVVLVIHDWGSALGFHWAKRNPERVKGIAFMEFIRPIPTWDEWPEFARETFQAFRTTDVGRKLIIDQNVFIEGTLPMGVVRPLTEVEMDHYREPFLNPVDREPLWRFPNELPIAGEPANIVALVEEYMDWLHQSPVPKLLFWGTPGVLIPPAEAARLAKSLPNCKAVDIGPGLNLLQEDNPDLIGSEIARWLSTLEISG

SEQ ID NO: 1335 - protein, 277 aa, Synthetic construct
MFHYVDVGPRDGTPVLFLHGNPTSSAVWRNIIPHVAPTHRCIAPDLIGMGKSDKPDLGYFFDDHVRFMDAFIEALGLEEVVLVIHDWGSALGFHWAKRNPERVKGIAFMEFIRPIPTWDEWPEFARETFQAFRTTDVGRKLIIDQNVFIEGTLPMGVVRPLTEVEMDHYREPFLNPVDREPLWRFPNELPIAGEPANIVALVEEYMDWLHQSPVPKLLFWGTPGVLIPPAEAARLAKSLPNCKAVDIGPGLNLLQEDNPDLIGSEIARWLSTLEISG

SEQ ID NO: 1336 - protein, 277 aa, Synthetic construct
MFHYVDVGPRDGTPVLFLHGNPTSSVVWRNIIPHVAPTHRCIAPDLIGMGKSDKPDLGYFFDDHVRFMDAFIEALGLEEVVLVIHDWGSALGFHWAKRNPERVKGIAFMEFIRPIPTWDEWPEFARETFQAFRTTDVGRKLIIDQNVFIEGTLPMGVVRPLTEVEMDHYREPFLNPVDREPLWRFPNELPIAGEPANIVALVEEYMDWLHQSPVPKLLFWGTPGVLIPPAEAARLAKSLPNCKAVDIGPGLNLLQEDNPDLIGSEIARWLSTLEISG

SEQ ID NO: 1337 - protein, 277 aa, Synthetic construct
MFHYVDVGPRDGTPVLFLHGNPTSSWVWRNIIPHVAPTHRCIAPDLIGMGKSDKPDLGYFFDDHVRFMDAFIEALGLEEVVLVIHDWGSALGFHWAKRNPERVKGIAFMEFIRPIPTWDEWPEFARETFQAFRTTDVGRKLIIDQNVFIEGTLPMGVVRPLTEVEMDHYREPFLNPVDREPLWRFPNELPIAGEPANIVALVEEYMDWLHQSPVPKLLFWGTPGVLIPPAEAARLAKSLPNCKAVDIGPGLNLLQEDNPDLIGSEIARWLSTLEISG

SEQ ID NO: 1338 - protein, 277 aa, Synthetic construct
MFHYVDVGPRDGTPVLFLHGNPTSSYLWRNIIPHVAPTHRCIAPDLIGMGKSDKPDLGYFFDDHVRFMDAFIEALGLEEVVLVIHDWGSALGFHWAKRNPERVKGIAFMEFIRPIPTWDEWPEFARETFQAFRTTDVGRKLIIDQNVFIEGTLPMGVVRPLTEVEMDHYREPFLNPVDREPLWRFPNELPIAGEPANIVALVEEYMDWLHQSPVPKLLFWGTPGVLIPPAEAARLAKSLPNCKAVDIGPGLNLLQEDNPDLIGSEIARWLSTLEISG

SEQ ID NO: 1339 - protein, 277 aa, Synthetic construct
MFHYVDVGPRDGTPVLFLHGNPTSSYIWRNIIPHVAPTHRCIAPDLIGMGKSDKPDLGYFFDDHVRFMDAFIEALGLEEVVLVIHDWGSALGFHWAKRNPERVKGIAFMEFIRPIPTWDEWPEFARETFQAFRTTDVGRKLIIDQNVFIEGTLPMGVVRPLTEVEMDHYREPFLNPVDREPLWRFPNELPIAGEPANIVALVEEYMDWLHQSPVPKLLFWGTPGVLIPPAEAARLAKSLPNCKAVDIGPGLNLLQEDNPDLIGSEIARWLSTLEISG

SEQ ID NO: 1340 - protein, 277 aa, Synthetic construct
MFHYVDVGPRDGTPVLFLHGNPTSSYMWRNIIPHVAPTHRCIAPDLIGMGKSDKPDLGYFFDDHVRFMDAFIEALGLEEVVLVIHDWGSALGFHWAKRNPERVKGIAFMEFIRPIPTWDEWPEFARETFQAFRTTDVGRKLIIDQNVFIEGTLPMGVVRPLTEVEMDHYREPFLNPVDREPLWRFPNELPIAGEPANIVALVEEYMDWLHQSPVPKLLFWGTPGVLIPPAEAARLAKSLPNCKAVDIGPGLNLLQEDNPDLIGSEIARWLSTLEISG

SEQ ID NO: 1341 - protein, 277 aa, Synthetic construct
MFHYVDVGPRDGTPVLFLHGNPTSSYTWRNIIPHVAPTHRCIAPDLIGMGKSDKPDLGYFFDDHVRFMDAFIEALGLEEVVLVIHDWGSALGFHWAKRNPERVKGIAFMEFIRPIPTWDEWPEFARETFQAFRTTDVGRKLIIDQNVFIEGTLPMGVVRPLTEVEMDHYREPFLNPVDREPLWRFPNELPIAGEPANIVALVEEYMDWLHQSPVPKLLFWGTPGVLIPPAEAARLAKSLPNCKAVDIGPGLNLLQEDNPDLIGSEIARWLSTLEISG

SEQ ID NO: 1342 - protein, 277 aa, Synthetic construct
MFHYVDVGPRDGTPVLFLHGNPTSSYAWRNIIPHVAPTHRCIAPDLIGMGKSDKPDLGYFFDDHVRFMDAFIEALGLEEVVLVIHDWGSALGFHWAKRNPERVKGIAFMEFIRPIPTWDEWPEFARETFQAFRTTDVGRKLIIDQNVFIEGTLPMGVVRPLTEVEMDHYREPFLNPVDREPLWRFPNELPIAGEPANIVALVEEYMDWLHQSPVPKLLFWGTPGVLIPPAEAARLAKSLPNCKAVDIGPGLNLLQEDNPDLIGSEIARWLSTLEISG

SEQ ID NO: 1343 - protein, 277 aa, Synthetic construct
MFHYVDVGPRDGTPVLFLHGNPTSSYQWRNIIPHVAPTHRCIAPDLIGMGKSDKPDLGYFFDDHVRFMDAFIEALGLEEVVLVIHDWGSALGFHWAKRNPERVKGIAFMEFIRPIPTWDEWPEFARETFQAFRTTDVGRKLIIDQNVFIEGTLPMGVVRPLTEVEMDHYREPFLNPVDREPLWRFPNELPIAGEPANIVALVEEYMDWLHQSPVPKLLFWGTPGVLIPPAEAARLAKSLPNCKAVDIGPGLNLLQEDNPDLIGSEIARWLSTLEISG

SEQ ID NO: 1344 - protein, 277 aa, Synthetic construct
MFHYVDVGPRDGTPVLFLHGNPTSSYVYRNIIPHVAPTHRCIAPDLIGMGKSDKPDLGYFFDDHVRFMDAFIEALGLEEVVLVIHDWGSALGFHWAKRNPERVKGIAFMEFIRPIPTWDEWPEFARETFQAFRTTDVGRKLIIDQNVFIEGTLPMGVVRPLTEVEMDHYREPFLNPVDREPLWRFPNELPIAGEPANIVALVEEYMDWLHQSPVPKLLFWGTPGVLIPPAEAARLAKSLPNCKAVDIGPGLNLLQEDNPDLIGSEIARWLSTLEISG

SEQ ID NO: 1345 - protein, 277 aa, Synthetic construct
MFHYVDVGPRDGTPVLFLHGNPTSSYVFRNIIPHVAPTHRCIAPDLIGMGKSDKPDLGYFFDDHVRFMDAFIEALGLEEVVLVIHDWGSALGFHWAKRNPERVKGIAFMEFIRPIPTWDEWPEFARETFQAFRTTDVGRKLIIDQNVFIEGTLPMGVVRPLTEVEMDHYREPFLNPVDREPLWRFPNELPIAGEPANIVALVEEYMDWLHQSPVPKLLFWGTPGVLIPPAEAARLAKSLPNCKAVDIGPGLNLLQEDNPDLIGSEIARWLSTLEISG

SEQ ID NO: 1346 - protein, 277 aa, Synthetic construct
MFHYVDVGPRDGTPVLFLHGNPTSSYVLRNIIPHVAPTHRCIAPDLIGMGKSDKPDLGYFFDDHVRFMDAFIEALGLEEVVLVIHDWGSALGFHWAKRNPERVKGIAFMEFIRPIPTWDEWPEFARETFQAFRTTDVGRKLIIDQNVFIEGTLPMGVVRPLTEVEMDHYREPFLNPVDREPLWRFPNELPIAGEPANIVALVEEYMDWLHQSPVPKLLFWGTPGVLIPPAEAARLAKSLPNCKAVDIGPGLNLLQEDNPDLIGSEIARWLSTLEISG

SEQ ID NO: 1347 - protein, 277 aa, Synthetic construct
MFHYVDVGPRDGTPVLFLHGNPTSSYVCRNIIPHVAPTHRCIAPDLIGMGKSDKPDLGYFFDDHVRFMDAFIEALGLEEVVLVIHDWGSALGFHWAKRNPERVKGIAFMEFIRPIPTWDEWPEFARETFQAFRTTDVGRKLIIDQNVFIEGTLPMGVVRPLTEVEMDHYREPFLNPVDREPLWRFPNELPIAGEPANIVALVEEYMDWLHQSPVPKLLFWGTPGVLIPPAEAARLAKSLPNCKAVDIGPGLNLLQEDNPDLIGSEIARWLSTLEISG

SEQ ID NO: 1348 - protein, 277 aa, Synthetic construct
MFHYVDVGPRDGTPVLFLHGNPTSSYVHRNIIPHVAPTHRCIAPDLIGMGKSDKPDLGYFFDDHVRFMDAFIEALGLEEVVLVIHDWGSALGFHWAKRNPERVKGIAFMEFIRPIPTWDEWPEFARETFQAFRTTDVGRKLIIDQNVFIEGTLPMGVVRPLTEVEMDHYREPFLNPVDREPLWRFPNELPIAGEPANIVALVEEYMDWLHQSPVPKLLFWGTPGVLIPPAEAARLAKSLPNCKAVDIGPGLNLLQEDNPDLIGSEIARWLSTLEISG

SEQ ID NO: 1349 - protein, 277 aa, Synthetic construct
MFHYVDVGPRDGTPVLFLHGNPTSSYVRRNIIPHVAPTHRCIAPDLIGMGKSDKPDLGYFFDDHVRFMDAFIEALGLEEVVLVIHDWGSALGFHWAKRNPERVKGIAFMEFIRPIPTWDEWPEFARETFQAFRTTDVGRKLIIDQNVFIEGTLPMGVVRPLTEVEMDHYREPFLNPVDREPLWRFPNELPIAGEPANIVALVEEYMDWLHQSPVPKLLFWGTPGVLIPPAEAARLAKSLPNCKAVDIGPGLNLLQEDNPDLIGSEIARWLSTLEISG

SEQ ID NO: 1350 - protein, 277 aa, Synthetic construct
MFHYVDVGPRDGTPVLFLHGNPTSSYVWHNIIPHVAPTHRCIAPDLIGMGKSDKPDLGYFFDDHVRFMDAFIEALGLEEVVLVIHDWGSALGFHWAKRNPERVKGIAFMEFIRPIPTWDEWPEFARETFQAFRTTDVGRKLIIDQNVFIEGTLPMGVVRPLTEVEMDHYREPFLNPVDREPLWRFPNELPIAGEPANIVALVEEYMDWLHQSPVPKLLFWGTPGVLIPPAEAARLAKSLPNCKAVDIGPGLNLLQEDNPDLIGSEIARWLSTLEISG

SEQ ID NO: 1351 - protein, 277 aa, Synthetic construct
MFHYVDVGPRDGTPVLFLHGNPTSSYVWKNIIPHVAPTHRCIAPDLIGMGKSDKPDLGYFFDDHVRFMDAFIEALGLEEVVLVIHDWGSALGFHWAKRNPERVKGIAFMEFIRPIPTWDEWPEFARETFQAFRTTDVGRKLIIDQNVFIEGTLPMGVVRPLTEVEMDHYREPFLNPVDREPLWRFPNELPIAGEPANIVALVEEYMDWLHQSPVPKLLFWGTPGVLIPPAEAARLAKSLPNCKAVDIGPGLNLLQEDNPDLIGSEIARWLSTLEISG

SEQ ID NO: 1352 - protein, 277 aa, Synthetic construct
MFHYVDVGPRDGTPVLFLHGNPTSSYVWSNIIPHVAPTHRCIAPDLIGMGKSDKPDLGYFFDDHVRFMDAFIEALGLEEVVLVIHDWGSALGFHWAKRNPERVKGIAFMEFIRPIPTWDEWPEFARETFQAFRTTDVGRKLIIDQNVFIEGTLPMGVVRPLTEVEMDHYREPFLNPVDREPLWRFPNELPIAGEPANIVALVEEYMDWLHQSPVPKLLFWGTPGVLIPPAEAARLAKSLPNCKAVDIGPGLNLLQEDNPDLIGSEIARWLSTLEISG

SEQ ID NO: 1353 - protein, 277 aa, Synthetic construct
MFHYVDVGPRDGTPVLFLHGNPTSSYVWQNIIPHVAPTHRCIAPDLIGMGKSDKPDLGYFFDDHVRFMDAFIEALGLEEVVLVIHDWGSALGFHWAKRNPERVKGIAFMEFIRPIPTWDEWPEFARETFQAFRTTDVGRKLIIDQNVFIEGTLPMGVVRPLTEVEMDHYREPFLNPVDREPLWRFPNELPIAGEPANIVALVEEYMDWLHQSPVPKLLFWGTPGVLIPPAEAARLAKSLPNCKAVDIGPGLNLLQEDNPDLIGSEIARWLSTLEISG

SEQ ID NO: 1354 - protein, 277 aa, Synthetic construct
MFHYVDVGPRDGTPVLFLHGNPTSSYVWANIIPHVAPTHRCIAPDLIGMGKSDKPDLGYFFDDHVRFMDAFIEALGLEEVVLVIHDWGSALGFHWAKRNPERVKGIAFMEFIRPIPTWDEWPEFARETFQAFRTTDVGRKLIIDQNVFIEGTLPMGVVRPLTEVEMDHYREPFLNPVDREPLWRFPNELPIAGEPANIVALVEEYMDWLHQSPVPKLLFWGTPGVLIPPAEAARLAKSLPNCKAVDIGPGLNLLQEDNPDLIGSEIARWLSTLEISG

SEQ ID NO: 1355 - protein, 277 aa, Synthetic construct
MFHYVDVGPRDGTPVLFLHGNPTSSYVWGNIIPHVAPTHRCIAPDLIGMGKSDKPDLGYFFDDHVRFMDAFIEALGLEEVVLVIHDWGSALGFHWAKRNPERVKGIAFMEFIRPIPTWDEWPEFARETFQAFRTTDVGRKLIIDQNVFIEGTLPMGVVRPLTEVEMDHYREPFLNPVDREPLWRFPNELPIAGEPANIVALVEEYMDWLHQSPVPKLLFWGTPGVLIPPAEAARLAKSLPNCKAVDIGPGLNLLQEDNPDLIGSEIARWLSTLEISG

SEQ ID NO: 1356 - protein, 277 aa, Synthetic construct
MFHYVDVGPRDGTPVLFLHGNPTSSYVWRHIIPHVAPTHRCIAPDLIGMGKSDKPDLGYFFDDHVRFMDAFIEALGLEEVVLVIHDWGSALGFHWAKRNPERVKGIAFMEFIRPIPTWDEWPEFARETFQAFRTTDVGRKLIIDQNVFIEGTLPMGVVRPLTEVEMDHYREPFLNPVDREPLWRFPNELPIAGEPANIVALVEEYMDWLHQSPVPKLLFWGTPGVLIPPAEAARLAKSLPNCKAVDIGPGLNLLQEDNPDLIGSEIARWLSTLEISG

SEQ ID NO: 1357 - protein, 277 aa, Synthetic construct
MFHYVDVGPRDGTPVLFLHGNPTSSYVWRKIIPHVAPTHRCIAPDLIGMGKSDKPDLGYFFDDHVRFMDAFIEALGLEEVVLVIHDWGSALGFHWAKRNPERVKGIAFMEFIRPIPTWDEWPEFARETFQAFRTTDVGRKLIIDQNVFIEGTLPMGVVRPLTEVEMDHYREPFLNPVDREPLWRFPNELPIAGEPANIVALVEEYMDWLHQSPVPKLLFWGTPGVLIPPAEAARLAKSLPNCKAVDIGPGLNLLQEDNPDLIGSEIARWLSTLEISG

SEQ ID NO: 1358 - protein, 277 aa, Synthetic construct
MFHYVDVGPRDGTPVLFLHGNPTSSYVWRDIIPHVAPTHRCIAPDLIGMGKSDKPDLGYFFDDHVRFMDAFIEALGLEEVVLVIHDWGSALGFHWAKRNPERVKGIAFMEFIRPIPTWDEWPEFARETFQAFRTTDVGRKLIIDQNVFIEGTLPMGVVRPLTEVEMDHYREPFLNPVDREPLWRFPNELPIAGEPANIVALVEEYMDWLHQSPVPKLLFWGTPGVLIPPAEAARLAKSLPNCKAVDIGPGLNLLQEDNPDLIGSEIARWLSTLEISG

SEQ ID NO: 1359 - protein, 277 aa, Synthetic construct
MFHYVDVGPRDGTPVLFLHGNPTSSYVWRRIIPHVAPTHRCIAPDLIGMGKSDKPDLGYFFDDHVRFMDAFIEALGLEEVVLVIHDWGSALGFHWAKRNPERVKGIAFMEFIRPIPTWDEWPEFARETFQAFRTTDVGRKLIIDQNVFIEGTLPMGVVRPLTEVEMDHYREPFLNPVDREPLWRFPNELPIAGEPANIVALVEEYMDWLHQSPVPKLLFWGTPGVLIPPAEAARLAKSLPNCKAVDIGPGLNLLQEDNPDLIGSEIARWLSTLEISG

SEQ ID NO: 1360 - protein, 277 aa, Synthetic construct
MFHYVDVGPRDGTPVLFLHGNPTSSYVWRSIIPHVAPTHRCIAPDLIGMGKSDKPDLGYFFDDHVRFMDAFIEALGLEEVVLVIHDWGSALGFHWAKRNPERVKGIAFMEFIRPIPTWDEWPEFARETFQAFRTTDVGRKLIIDQNVFIEGTLPMGVVRPLTEVEMDHYREPFLNPVDREPLWRFPNELPIAGEPANIVALVEEYMDWLHQSPVPKLLFWGTPGVLIPPAEAARLAKSLPNCKAVDIGPGLNLLQEDNPDLIGSEIARWLSTLEISG

SEQ ID NO: 1361 - protein, 277 aa, Synthetic construct
MFHYVDVGPRDGTPVLFLHGNPTSSYVWRGIIPHVAPTHRCIAPDLIGMGKSDKPDLGYFFDDHVRFMDAFIEALGLEEVVLVIHDWGSALGFHWAKRNPERVKGIAFMEFIRPIPTWDEWPEFARETFQAFRTTDVGRKLIIDQNVFIEGTLPMGVVRPLTEVEMDHYREPFLNPVDREPLWRFPNELPIAGEPANIVALVEEYMDWLHQSPVPKLLFWGTPGVLIPPAEAARLAKSLPNCKAVDIGPGLNLLQEDNPDLIGSEIARWLSTLEISG

SEQ ID NO: 1362 - protein, 277 aa, Synthetic construct
MFHYVDVGPRDGTPVLFLHGNPTSSYVWRNVIPHVAPTHRCIAPDLIGMGKSDKPDLGYFFDDHVRFMDAFIEALGLEEVVLVIHDWGSALGFHWAKRNPERVKGIAFMEFIRPIPTWDEWPEFARETFQAFRTTDVGRKLIIDQNVFIEGTLPMGVVRPLTEVEMDHYREPFLNPVDREPLWRFPNELPIAGEPANIVALVEEYMDWLHQSPVPKLLFWGTPGVLIPPAEAARLAKSLPNCKAVDIGPGLNLLQEDNPDLIGSEIARWLSTLEISG

SEQ ID NO: 1363 - protein, 277 aa, Synthetic construct
MFHYVDVGPRDGTPVLFLHGNPTSSYVWRNLIPHVAPTHRCIAPDLIGMGKSDKPDLGYFFDDHVRFMDAFIEALGLEEVVLVIHDWGSALGFHWAKRNPERVKGIAFMEFIRPIPTWDEWPEFARETFQAFRTTDVGRKLIIDQNVFIEGTLPMGVVRPLTEVEMDHYREPFLNPVDREPLWRFPNELPIAGEPANIVALVEEYMDWLHQSPVPKLLFWGTPGVLIPPAEAARLAKSLPNCKAVDIGPGLNLLQEDNPDLIGSEIARWLSTLEISG

SEQ ID NO: 1364 - protein, 277 aa, Synthetic construct
MFHYVDVGPRDGTPVLFLHGNPTSSYVWRNMIPHVAPTHRCIAPDLIGMGKSDKPDLGYFFDDHVRFMDAFIEALGLEEVVLVIHDWGSALGFHWAKRNPERVKGIAFMEFIRPIPTWDEWPEFARETFQAFRTTDVGRKLIIDQNVFIEGTLPMGVVRPLTEVEMDHYREPFLNPVDREPLWRFPNELPIAGEPANIVALVEEYMDWLHQSPVPKLLFWGTPGVLIPPAEAARLAKSLPNCKAVDIGPGLNLLQEDNPDLIGSEIARWLSTLEISG

SEQ ID NO: 1365 - protein, 277 aa, Synthetic construct
MFHYVDVGPRDGTPVLFLHGNPTSSYVWRNAIPHVAPTHRCIAPDLIGMGKSDKPDLGYFFDDHVRFMDAFIEALGLEEVVLVIHDWGSALGFHWAKRNPERVKGIAFMEFIRPIPTWDEWPEFARETFQAFRTTDVGRKLIIDQNVFIEGTLPMGVVRPLTEVEMDHYREPFLNPVDREPLWRFPNELPIAGEPANIVALVEEYMDWLHQSPVPKLLFWGTPGVLIPPAEAARLAKSLPNCKAVDIGPGLNLLQEDNPDLIGSEIARWLSTLEISG

SEQ ID NO: 1366 - protein, 277 aa, Synthetic construct
MFHYVDVGPRDGTPVLFLHGNPTSSYVWRNFIPHVAPTHRCIAPDLIGMGKSDKPDLGYFFDDHVRFMDAFIEALGLEEVVLVIHDWGSALGFHWAKRNPERVKGIAFMEFIRPIPTWDEWPEFARETFQAFRTTDVGRKLIIDQNVFIEGTLPMGVVRPLTEVEMDHYREPFLNPVDREPLWRFPNELPIAGEPANIVALVEEYMDWLHQSPVPKLLFWGTPGVLIPPAEAARLAKSLPNCKAVDIGPGLNLLQEDNPDLIGSEIARWLSTLEISG

SEQ ID NO: 1367 - protein, 277 aa, Synthetic construct
MFHYVDVGPRDGTPVLFLHGNPTSSYVWRNTIPHVAPTHRCIAPDLIGMGKSDKPDLGYFFDDHVRFMDAFIEALGLEEVVLVIHDWGSALGFHWAKRNPERVKGIAFMEFIRPIPTWDEWPEFARETFQAFRTTDVGRKLIIDQNVFIEGTLPMGVVRPLTEVEMDHYREPFLNPVDREPLWRFPNELPIAGEPANIVALVEEYMDWLHQSPVPKLLFWGTPGVLIPPAEAARLAKSLPNCKAVDIGPGLNLLQEDNPDLIGSEIARWLSTLEISG

SEQ ID NO: 1368 - protein, 277 aa, Synthetic construct
MFHYVDVGPRDGTPVLFLHGNPTSSYVWRNILPHVAPTHRCIAPDLIGMGKSDKPDLGYFFDDHVRFMDAFIEALGLEEVVLVIHDWGSALGFHWAKRNPERVKGIAFMEFIRPIPTWDEWPEFARETFQAFRTTDVGRKLIIDQNVFIEGTLPMGVVRPLTEVEMDHYREPFLNPVDREPLWRFPNELPIAGEPANIVALVEEYMDWLHQSPVPKLLFWGTPGVLIPPAEAARLAKSLPNCKAVDIGPGLNLLQEDNPDLIGSEIARWLSTLEISG

SEQ ID NO: 1369 - protein, 277 aa, Synthetic construct
MFHYVDVGPRDGTPVLFLHGNPTSSYVWRNIMPHVAPTHRCIAPDLIGMGKSDKPDLGYFFDDHVRFMDAFIEALGLEEVVLVIHDWGSALGFHWAKRNPERVKGIAFMEFIRPIPTWDEWPEFARETFQAFRTTDVGRKLIIDQNVFIEGTLPMGVVRPLTEVEMDHYREPFLNPVDREPLWRFPNELPIAGEPANIVALVEEYMDWLHQSPVPKLLFWGTPGVLIPPAEAARLAKSLPNCKAVDIGPGLNLLQEDNPDLIGSEIARWLSTLEISG

SEQ ID NO: 1370 - protein, 277 aa, Synthetic construct
MFHYVDVGPRDGTPVLFLHGNPTSSYVWRNIVPHVAPTHRCIAPDLIGMGKSDKPDLGYFFDDHVRFMDAFIEALGLEEVVLVIHDWGSALGFHWAKRNPERVKGIAFMEFIRPIPTWDEWPEFARETFQAFRTTDVGRKLIIDQNVFIEGTLPMGVVRPLTEVEMDHYREPFLNPVDREPLWRFPNELPIAGEPANIVALVEEYMDWLHQSPVPKLLFWGTPGVLIPPAEAARLAKSLPNCKAVDIGPGLNLLQEDNPDLIGSEIARWLSTLEISG

SEQ ID NO: 1371 - protein, 277 aa, Synthetic construct
MFHYVDVGPRDGTPVLFLHGNPTSSYVWRNIAPHVAPTHRCIAPDLIGMGKSDKPDLGYFFDDHVRFMDAFIEALGLEEVVLVIHDWGSALGFHWAKRNPERVKGIAFMEFIRPIPTWDEWPEFARETFQAFRTTDVGRKLIIDQNVFIEGTLPMGVVRPLTEVEMDHYREPFLNPVDREPLWRFPNELPIAGEPANIVALVEEYMDWLHQSPVPKLLFWGTPGVLIPPAEAARLAKSLPNCKAVDIGPGLNLLQEDNPDLIGSEIARWLSTLEISG

SEQ ID NO: 1372 - protein, 277 aa, Synthetic construct
MFHYVDVGPRDGTPVLFLHGNPTSSYVWRNIFPHVAPTHRCIAPDLIGMGKSDKPDLGYFFDDHVRFMDAFIEALGLEEVVLVIHDWGSALGFHWAKRNPERVKGIAFMEFIRPIPTWDEWPEFARETFQAFRTTDVGRKLIIDQNVFIEGTLPMGVVRPLTEVEMDHYREPFLNPVDREPLWRFPNELPIAGEPANIVALVEEYMDWLHQSPVPKLLFWGTPGVLIPPAEAARLAKSLPNCKAVDIGPGLNLLQEDNPDLIGSEIARWLSTLEISG

SEQ ID NO: 1373 - protein, 277 aa, Synthetic construct
MFHYVDVGPRDGTPVLFLHGNPTSSYVWRNITPHVAPTHRCIAPDLIGMGKSDKPDLGYFFDDHVRFMDAFIEALGLEEVVLVIHDWGSALGFHWAKRNPERVKGIAFMEFIRPIPTWDEWPEFARETFQAFRTTDVGRKLIIDQNVFIEGTLPMGVVRPLTEVEMDHYREPFLNPVDREPLWRFPNELPIAGEPANIVALVEEYMDWLHQSPVPKLLFWGTPGVLIPPAEAARLAKSLPNCKAVDIGPGLNLLQEDNPDLIGSEIARWLSTLEISG

SEQ ID NO: 1374 - protein, 277 aa, Synthetic construct
MFHYVDVGPRDGTPVLFLHGNPTSSYVWRNIIAHVAPTHRCIAPDLIGMGKSDKPDLGYFFDDHVRFMDAFIEALGLEEVVLVIHDWGSALGFHWAKRNPERVKGIAFMEFIRPIPTWDEWPEFARETFQAFRTTDVGRKLIIDQNVFIEGTLPMGVVRPLTEVEMDHYREPFLNPVDREPLWRFPNELPIAGEPANIVALVEEYMDWLHQSPVPKLLFWGTPGVLIPPAEAARLAKSLPNCKAVDIGPGLNLLQEDNPDLIGSEIARWLSTLEISG

SEQ ID NO: 1375 - protein, 277 aa, Synthetic construct
MFHYVDVGPRDGTPVLFLHGNPTSSYVWRNIIRHVAPTHRCIAPDLIGMGKSDKPDLGYFFDDHVRFMDAFIEALGLEEVVLVIHDWGSALGFHWAKRNPERVKGIAFMEFIRPIPTWDEWPEFARETFQAFRTTDVGRKLIIDQNVFIEGTLPMGVVRPLTEVEMDHYREPFLNPVDREPLWRFPNELPIAGEPANIVALVEEYMDWLHQSPVPKLLFWGTPGVLIPPAEAARLAKSLPNCKAVDIGPGLNLLQEDNPDLIGSEIARWLSTLEISG

SEQ ID NO: 1376 - protein, 277 aa, Synthetic construct
MFHYVDVGPRDGTPVLFLHGNPTSSYVWRNIISHVAPTHRCIAPDLIGMGKSDKPDLGYFFDDHVRFMDAFIEALGLEEVVLVIHDWGSALGFHWAKRNPERVKGIAFMEFIRPIPTWDEWPEFARETFQAFRTTDVGRKLIIDQNVFIEGTLPMGVVRPLTEVEMDHYREPFLNPVDREPLWRFPNELPIAGEPANIVALVEEYMDWLHQSPVPKLLFWGTPGVLIPPAEAARLAKSLPNCKAVDIGPGLNLLQEDNPDLIGSEIARWLSTLEISG

SEQ ID NO: 1377 - protein, 277 aa, Synthetic construct
MFHYVDVGPRDGTPVLFLHGNPTSSYVWRNIIKHVAPTHRCIAPDLIGMGKSDKPDLGYFFDDHVRFMDAFIEALGLEEVVLVIHDWGSALGFHWAKRNPERVKGIAFMEFIRPIPTWDEWPEFARETFQAFRTTDVGRKLIIDQNVFIEGTLPMGVVRPLTEVEMDHYREPFLNPVDREPLWRFPNELPIAGEPANIVALVEEYMDWLHQSPVPKLLFWGTPGVLIPPAEAARLAKSLPNCKAVDIGPGLNLLQEDNPDLIGSEIARWLSTLEISG

SEQ ID NO: 1378 - protein, 277 aa, Synthetic construct
MFHYVDVGPRDGTPVLFLHGNPTSSYVWRNIIGHVAPTHRCIAPDLIGMGKSDKPDLGYFFDDHVRFMDAFIEALGLEEVVLVIHDWGSALGFHWAKRNPERVKGIAFMEFIRPIPTWDEWPEFARETFQAFRTTDVGRKLIIDQNVFIEGTLPMGVVRPLTEVEMDHYREPFLNPVDREPLWRFPNELPIAGEPANIVALVEEYMDWLHQSPVPKLLFWGTPGVLIPPAEAARLAKSLPNCKAVDIGPGLNLLQEDNPDLIGSEIARWLSTLEISG

SEQ ID NO: 1379 - protein, 277 aa, Synthetic construct
MFHYVDVGPRDGTPVLFLHGNPTSSYVWRNIIEHVAPTHRCIAPDLIGMGKSDKPDLGYFFDDHVRFMDAFIEALGLEEVVLVIHDWGSALGFHWAKRNPERVKGIAFMEFIRPIPTWDEWPEFARETFQAFRTTDVGRKLIIDQNVFIEGTLPMGVVRPLTEVEMDHYREPFLNPVDREPLWRFPNELPIAGEPANIVALVEEYMDWLHQSPVPKLLFWGTPGVLIPPAEAARLAKSLPNCKAVDIGPGLNLLQEDNPDLIGSEIARWLSTLEISG

SEQ ID NO: 1380 - protein, 277 aa, Synthetic construct
MFHYVDVGPRDGTPVLFLHGNPTSSYVWRNIIPYVAPTHRCIAPDLIGMGKSDKPDLGYFFDDHVRFMDAFIEALGLEEVVLVIHDWGSALGFHWAKRNPERVKGIAFMEFIRPIPTWDEWPEFARETFQAFRTTDVGRKLIIDQNVFIEGTLPMGVVRPLTEVEMDHYREPFLNPVDREPLWRFPNELPIAGEPANIVALVEEYMDWLHQSPVPKLLFWGTPGVLIPPAEAARLAKSLPNCKAVDIGPGLNLLQEDNPDLIGSEIARWLSTLEISG

SEQ ID NO: 1381 - protein, 277 aa, Synthetic construct
MFHYVDVGPRDGTPVLFLHGNPTSSYVWRNIIPAVAPTHRCIAPDLIGMGKSDKPDLGYFFDDHVRFMDAFIEALGLEEVVLVIHDWGSALGFHWAKRNPERVKGIAFMEFIRPIPTWDEWPEFARETFQAFRTTDVGRKLIIDQNVFIEGTLPMGVVRPLTEVEMDHYREPFLNPVDREPLWRFPNELPIAGEPANIVALVEEYMDWLHQSPVPKLLFWGTPGVLIPPAEAARLAKSLPNCKAVDIGPGLNLLQEDNPDLIGSEIARWLSTLEISG

SEQ ID NO: 1382 - protein, 277 aa, Synthetic construct
MFHYVDVGPRDGTPVLFLHGNPTSSYVWRNIIPRVAPTHRCIAPDLIGMGKSDKPDLGYFFDDHVRFMDAFIEALGLEEVVLVIHDWGSALGFHWAKRNPERVKGIAFMEFIRPIPTWDEWPEFARETFQAFRTTDVGRKLIIDQNVFIEGTLPMGVVRPLTEVEMDHYREPFLNPVDREPLWRFPNELPIAGEPANIVALVEEYMDWLHQSPVPKLLFWGTPGVLIPPAEAARLAKSLPNCKAVDIGPGLNLLQEDNPDLIGSEIARWLSTLEISG

SEQ ID NO: 1383 - protein, 277 aa, Synthetic construct
MFHYVDVGPRDGTPVLFLHGNPTSSYVWRNIIPFVAPTHRCIAPDLIGMGKSDKPDLGYFFDDHVRFMDAFIEALGLEEVVLVIHDWGSALGFHWAKRNPERVKGIAFMEFIRPIPTWDEWPEFARETFQAFRTTDVGRKLIIDQNVFIEGTLPMGVVRPLTEVEMDHYREPFLNPVDREPLWRFPNELPIAGEPANIVALVEEYMDWLHQSPVPKLLFWGTPGVLIPPAEAARLAKSLPNCKAVDIGPGLNLLQEDNPDLIGSEIARWLSTLEISG

SEQ ID NO: 1384 - protein, 277 aa, Synthetic construct
MFHYVDVGPRDGTPVLFLHGNPTSSYVWRNIIPQVAPTHRCIAPDLIGMGKSDKPDLGYFFDDHVRFMDAFIEALGLEEVVLVIHDWGSALGFHWAKRNPERVKGIAFMEFIRPIPTWDEWPEFARETFQAFRTTDVGRKLIIDQNVFIEGTLPMGVVRPLTEVEMDHYREPFLNPVDREPLWRFPNELPIAGEPANIVALVEEYMDWLHQSPVPKLLFWGTPGVLIPPAEAARLAKSLPNCKAVDIGPGLNLLQEDNPDLIGSEIARWLSTLEISG

SEQ ID NO: 1385 - protein, 277 aa, Synthetic construct
MFHYVDVGPRDGTPVLFLHGNPTSSYVWRNIIPLVAPTHRCIAPDLIGMGKSDKPDLGYFFDDHVRFMDAFIEALGLEEVVLVIHDWGSALGFHWAKRNPERVKGIAFMEFIRPIPTWDEWPEFARETFQAFRTTDVGRKLIIDQNVFIEGTLPMGVVRPLTEVEMDHYREPFLNPVDREPLWRFPNELPIAGEPANIVALVEEYMDWLHQSPVPKLLFWGTPGVLIPPAEAARLAKSLPNCKAVDIGPGLNLLQEDNPDLIGSEIARWLSTLEISG

SEQ ID NO: 1386 - protein, 277 aa, Synthetic construct
MFHYVDVGPRDGTPVLFLHGNPTSSYVWRNIIPHLAPTHRCIAPDLIGMGKSDKPDLGYFFDDHVRFMDAFIEALGLEEVVLVIHDWGSALGFHWAKRNPERVKGIAFMEFIRPIPTWDEWPEFARETFQAFRTTDVGRKLIIDQNVFIEGTLPMGVVRPLTEVEMDHYREPFLNPVDREPLWRFPNELPIAGEPANIVALVEEYMDWLHQSPVPKLLFWGTPGVLIPPAEAARLAKSLPNCKAVDIGPGLNLLQEDNPDLIGSEIARWLSTLEISG

SEQ ID NO: 1387 - protein, 277 aa, Synthetic construct
MFHYVDVGPRDGTPVLFLHGNPTSSYVWRNIIPHIAPTHRCIAPDLIGMGKSDKPDLGYFFDDHVRFMDAFIEALGLEEVVLVIHDWGSALGFHWAKRNPERVKGIAFMEFIRPIPTWDEWPEFARETFQAFRTTDVGRKLIIDQNVFIEGTLPMGVVRPLTEVEMDHYREPFLNPVDREPLWRFPNELPIAGEPANIVALVEEYMDWLHQSPVPKLLFWGTPGVLIPPAEAARLAKSLPNCKAVDIGPGLNLLQEDNPDLIGSEIARWLSTLEISG

SEQ ID NO: 1388 - protein, 277 aa, Synthetic construct
MFHYVDVGPRDGTPVLFLHGNPTSSYVWRNIIPHFAPTHRCIAPDLIGMGKSDKPDLGYFFDDHVRFMDAFIEALGLEEVVLVIHDWGSALGFHWAKRNPERVKGIAFMEFIRPIPTWDEWPEFARETFQAFRTTDVGRKLIIDQNVFIEGTLPMGVVRPLTEVEMDHYREPFLNPVDREPLWRFPNELPIAGEPANIVALVEEYMDWLHQSPVPKLLFWGTPGVLIPPAEAARLAKSLPNCKAVDIGPGLNLLQEDNPDLIGSEIARWLSTLEISG

SEQ ID NO: 1389 - protein, 277 aa, Synthetic construct
MFHYVDVGPRDGTPVLFLHGNPTSSYVWRNIIPHAAPTHRCIAPDLIGMGKSDKPDLGYFFDDHVRFMDAFIEALGLEEVVLVIHDWGSALGFHWAKRNPERVKGIAFMEFIRPIPTWDEWPEFARETFQAFRTTDVGRKLIIDQNVFIEGTLPMGVVRPLTEVEMDHYREPFLNPVDREPLWRFPNELPIAGEPANIVALVEEYMDWLHQSPVPKLLFWGTPGVLIPPAEAARLAKSLPNCKAVDIGPGLNLLQEDNPDLIGSEIARWLSTLEISG

SEQ ID NO: 1390 - protein, 277 aa, Synthetic construct
MFHYVDVGPRDGTPVLFLHGNPTSSYVWRNIIPHMAPTHRCIAPDLIGMGKSDKPDLGYFFDDHVRFMDAFIEALGLEEVVLVIHDWGSALGFHWAKRNPERVKGIAFMEFIRPIPTWDEWPEFARETFQAFRTTDVGRKLIIDQNVFIEGTLPMGVVRPLTEVEMDHYREPFLNPVDREPLWRFPNELPIAGEPANIVALVEEYMDWLHQSPVPKLLFWGTPGVLIPPAEAARLAKSLPNCKAVDIGPGLNLLQEDNPDLIGSEIARWLSTLEISG

SEQ ID NO: 1391 - protein, 277 aa, Synthetic construct
MFHYVDVGPRDGTPVLFLHGNPTSSYVWRNIIPHTAPTHRCIAPDLIGMGKSDKPDLGYFFDDHVRFMDAFIEALGLEEVVLVIHDWGSALGFHWAKRNPERVKGIAFMEFIRPIPTWDEWPEFARETFQAFRTTDVGRKLIIDQNVFIEGTLPMGVVRPLTEVEMDHYREPFLNPVDREPLWRFPNELPIAGEPANIVALVEEYMDWLHQSPVPKLLFWGTPGVLIPPAEAARLAKSLPNCKAVDIGPGLNLLQEDNPDLIGSEIARWLSTLEISG

SEQ ID NO: 1392 - protein, 277 aa, Synthetic construct
MFHYVDVGPRDGTPVLFLHGNPTSSYVWRNIIPHVSPTHRCIAPDLIGMGKSDKPDLGYFFDDHVRFMDAFIEALGLEEVVLVIHDWGSALGFHWAKRNPERVKGIAFMEFIRPIPTWDEWPEFARETFQAFRTTDVGRKLIIDQNVFIEGTLPMGVVRPLTEVEMDHYREPFLNPVDREPLWRFPNELPIAGEPANIVALVEEYMDWLHQSPVPKLLFWGTPGVLIPPAEAARLAKSLPNCKAVDIGPGLNLLQEDNPDLIGSEIARWLSTLEISG

SEQ ID NO: 1393 - protein, 277 aa, Synthetic construct
MFHYVDVGPRDGTPVLFLHGNPTSSYVWRNIIPHVTPTHRCIAPDLIGMGKSDKPDLGYFFDDHVRFMDAFIEALGLEEVVLVIHDWGSALGFHWAKRNPERVKGIAFMEFIRPIPTWDEWPEFARETFQAFRTTDVGRKLIIDQNVFIEGTLPMGVVRPLTEVEMDHYREPFLNPVDREPLWRFPNELPIAGEPANIVALVEEYMDWLHQSPVPKLLFWGTPGVLIPPAEAARLAKSLPNCKAVDIGPGLNLLQEDNPDLIGSEIARWLSTLEISG

SEQ ID NO: 1394 - protein, 277 aa, Synthetic construct
MFHYVDVGPRDGTPVLFLHGNPTSSYVWRNIIPHVEPTHRCIAPDLIGMGKSDKPDLGYFFDDHVRFMDAFIEALGLEEVVLVIHDWGSALGFHWAKRNPERVKGIAFMEFIRPIPTWDEWPEFARETFQAFRTTDVGRKLIIDQNVFIEGTLPMGVVRPLTEVEMDHYREPFLNPVDREPLWRFPNELPIAGEPANIVALVEEYMDWLHQSPVPKLLFWGTPGVLIPPAEAARLAKSLPNCKAVDIGPGLNLLQEDNPDLIGSEIARWLSTLEISG

SEQ ID NO: 1395 - protein, 277 aa, Synthetic construct
MFHYVDVGPRDGTPVLFLHGNPTSSYVWRNIIPHVGPTHRCIAPDLIGMGKSDKPDLGYFFDDHVRFMDAFIEALGLEEVVLVIHDWGSALGFHWAKRNPERVKGIAFMEFIRPIPTWDEWPEFARETFQAFRTTDVGRKLIIDQNVFIEGTLPMGVVRPLTEVEMDHYREPFLNPVDREPLWRFPNELPIAGEPANIVALVEEYMDWLHQSPVPKLLFWGTPGVLIPPAEAARLAKSLPNCKAVDIGPGLNLLQEDNPDLIGSEIARWLSTLEISG

SEQ ID NO: 1396 - protein, 277 aa, Synthetic construct
MFHYVDVGPRDGTPVLFLHGNPTSSYVWRNIIPHVQPTHRCIAPDLIGMGKSDKPDLGYFFDDHVRFMDAFIEALGLEEVVLVIHDWGSALGFHWAKRNPERVKGIAFMEFIRPIPTWDEWPEFARETFQAFRTTDVGRKLIIDQNVFIEGTLPMGVVRPLTEVEMDHYREPFLNPVDREPLWRFPNELPIAGEPANIVALVEEYMDWLHQSPVPKLLFWGTPGVLIPPAEAARLAKSLPNCKAVDIGPGLNLLQEDNPDLIGSEIARWLSTLEISG

SEQ ID NO: 1397 - protein, 277 aa, Synthetic construct
MFHYVDVGPRDGTPVLFLHGNPTSSYVWRNIIPHVLPTHRCIAPDLIGMGKSDKPDLGYFFDDHVRFMDAFIEALGLEEVVLVIHDWGSALGFHWAKRNPERVKGIAFMEFIRPIPTWDEWPEFARETFQAFRTTDVGRKLIIDQNVFIEGTLPMGVVRPLTEVEMDHYREPFLNPVDREPLWRFPNELPIAGEPANIVALVEEYMDWLHQSPVPKLLFWGTPGVLIPPAEAARLAKSLPNCKAVDIGPGLNLLQEDNPDLIGSEIARWLSTLEISG

SEQ ID NO: 1398 - protein, 277 aa, Synthetic construct
MFHYVDVGPRDGTPVLFLHGNPTSSYVWRNIIPHVAATHRCIAPDLIGMGKSDKPDLGYFFDDHVRFMDAFIEALGLEEVVLVIHDWGSALGFHWAKRNPERVKGIAFMEFIRPIPTWDEWPEFARETFQAFRTTDVGRKLIIDQNVFIEGTLPMGVVRPLTEVEMDHYREPFLNPVDREPLWRFPNELPIAGEPANIVALVEEYMDWLHQSPVPKLLFWGTPGVLIPPAEAARLAKSLPNCKAVDIGPGLNLLQEDNPDLIGSEIARWLSTLEISG

SEQ ID NO: 1399 - protein, 277 aa, Synthetic construct
MFHYVDVGPRDGTPVLFLHGNPTSSYVWRNIIPHVAETHRCIAPDLIGMGKSDKPDLGYFFDDHVRFMDAFIEALGLEEVVLVIHDWGSALGFHWAKRNPERVKGIAFMEFIRPIPTWDEWPEFARETFQAFRTTDVGRKLIIDQNVFIEGTLPMGVVRPLTEVEMDHYREPFLNPVDREPLWRFPNELPIAGEPANIVALVEEYMDWLHQSPVPKLLFWGTPGVLIPPAEAARLAKSLPNCKAVDIGPGLNLLQEDNPDLIGSEIARWLSTLEISG

SEQ ID NO: 1400 - protein, 277 aa, Synthetic construct
MFHYVDVGPRDGTPVLFLHGNPTSSYVWRNIIPHVAKTHRCIAPDLIGMGKSDKPDLGYFFDDHVRFMDAFIEALGLEEVVLVIHDWGSALGFHWAKRNPERVKGIAFMEFIRPIPTWDEWPEFARETFQAFRTTDVGRKLIIDQNVFIEGTLPMGVVRPLTEVEMDHYREPFLNPVDREPLWRFPNELPIAGEPANIVALVEEYMDWLHQSPVPKLLFWGTPGVLIPPAEAARLAKSLPNCKAVDIGPGLNLLQEDNPDLIGSEIARWLSTLEISG

SEQ ID NO: 1401 - protein, 277 aa, Synthetic construct
MFHYVDVGPRDGTPVLFLHGNPTSSYVWRNIIPHVAGTHRCIAPDLIGMGKSDKPDLGYFFDDHVRFMDAFIEALGLEEVVLVIHDWGSALGFHWAKRNPERVKGIAFMEFIRPIPTWDEWPEFARETFQAFRTTDVGRKLIIDQNVFIEGTLPMGVVRPLTEVEMDHYREPFLNPVDREPLWRFPNELPIAGEPANIVALVEEYMDWLHQSPVPKLLFWGTPGVLIPPAEAARLAKSLPNCKAVDIGPGLNLLQEDNPDLIGSEIARWLSTLEISG

SEQ ID NO: 1402 - protein, 277 aa, Synthetic construct
MFHYVDVGPRDGTPVLFLHGNPTSSYVWRNIIPHVASTHRCIAPDLIGMGKSDKPDLGYFFDDHVRFMDAFIEALGLEEVVLVIHDWGSALGFHWAKRNPERVKGIAFMEFIRPIPTWDEWPEFARETFQAFRTTDVGRKLIIDQNVFIEGTLPMGVVRPLTEVEMDHYREPFLNPVDREPLWRFPNELPIAGEPANIVALVEEYMDWLHQSPVPKLLFWGTPGVLIPPAEAARLAKSLPNCKAVDIGPGLNLLQEDNPDLIGSEIARWLSTLEISG

SEQ ID NO: 1403 - protein, 277 aa, Synthetic construct
MFHYVDVGPRDGTPVLFLHGNPTSSYVWRNIIPHVADTHRCIAPDLIGMGKSDKPDLGYFFDDHVRFMDAFIEALGLEEVVLVIHDWGSALGFHWAKRNPERVKGIAFMEFIRPIPTWDEWPEFARETFQAFRTTDVGRKLIIDQNVFIEGTLPMGVVRPLTEVEMDHYREPFLNPVDREPLWRFPNELPIAGEPANIVALVEEYMDWLHQSPVPKLLFWGTPGVLIPPAEAARLAKSLPNCKAVDIGPGLNLLQEDNPDLIGSEIARWLSTLEISG

SEQ ID NO: 1404 - protein, 277 aa, Synthetic construct
MFHYVDVGPRDGTPVLFLHGNPTSSYVWRNIIPHVAPHHRCIAPDLIGMGKSDKPDLGYFFDDHVRFMDAFIEALGLEEVVLVIHDWGSALGFHWAKRNPERVKGIAFMEFIRPIPTWDEWPEFARETFQAFRTTDVGRKLIIDQNVFIEGTLPMGVVRPLTEVEMDHYREPFLNPVDREPLWRFPNELPIAGEPANIVALVEEYMDWLHQSPVPKLLFWGTPGVLIPPAEAARLAKSLPNCKAVDIGPGLNLLQEDNPDLIGSEIARWLSTLEISG

SEQ ID NO: 1405 - protein, 277 aa, Synthetic construct
MFHYVDVGPRDGTPVLFLHGNPTSSYVWRNIIPHVAPSHRCIAPDLIGMGKSDKPDLGYFFDDHVRFMDAFIEALGLEEVVLVIHDWGSALGFHWAKRNPERVKGIAFMEFIRPIPTWDEWPEFARETFQAFRTTDVGRKLIIDQNVFIEGTLPMGVVRPLTEVEMDHYREPFLNPVDREPLWRFPNELPIAGEPANIVALVEEYMDWLHQSPVPKLLFWGTPGVLIPPAEAARLAKSLPNCKAVDIGPGLNLLQEDNPDLIGSEIARWLSTLEISG

SEQ ID NO: 1406 - protein, 277 aa, Synthetic construct
MFHYVDVGPRDGTPVLFLHGNPTSSYVWRNIIPHVAPDHRCIAPDLIGMGKSDKPDLGYFFDDHVRFMDAFIEALGLEEVVLVIHDWGSALGFHWAKRNPERVKGIAFMEFIRPIPTWDEWPEFARETFQAFRTTDVGRKLIIDQNVFIEGTLPMGVVRPLTEVEMDHYREPFLNPVDREPLWRFPNELPIAGEPANIVALVEEYMDWLHQSPVPKLLFWGTPGVLIPPAEAARLAKSLPNCKAVDIGPGLNLLQEDNPDLIGSEIARWLSTLEISG

SEQ ID NO: 1407 - protein, 277 aa, Synthetic construct
MFHYVDVGPRDGTPVLFLHGNPTSSYVWRNIIPHVAPRHRCIAPDLIGMGKSDKPDLGYFFDDHVRFMDAFIEALGLEEVVLVIHDWGSALGFHWAKRNPERVKGIAFMEFIRPIPTWDEWPEFARETFQAFRTTDVGRKLIIDQNVFIEGTLPMGVVRPLTEVEMDHYREPFLNPVDREPLWRFPNELPIAGEPANIVALVEEYMDWLHQSPVPKLLFWGTPGVLIPPAEAARLAKSLPNCKAVDIGPGLNLLQEDNPDLIGSEIARWLSTLEISG

SEQ ID NO: 1408 - protein, 277 aa, Synthetic construct
MFHYVDVGPRDGTPVLFLHGNPTSSYVWRNIIPHVAPQHRCIAPDLIGMGKSDKPDLGYFFDDHVRFMDAFIEALGLEEVVLVIHDWGSALGFHWAKRNPERVKGIAFMEFIRPIPTWDEWPEFARETFQAFRTTDVGRKLIIDQNVFIEGTLPMGVVRPLTEVEMDHYREPFLNPVDREPLWRFPNELPIAGEPANIVALVEEYMDWLHQSPVPKLLFWGTPGVLIPPAEAARLAKSLPNCKAVDIGPGLNLLQEDNPDLIGSEIARWLSTLEISG

SEQ ID NO: 1409 - protein, 277 aa, Synthetic construct
MFHYVDVGPRDGTPVLFLHGNPTSSYVWRNIIPHVAPNHRCIAPDLIGMGKSDKPDLGYFFDDHVRFMDAFIEALGLEEVVLVIHDWGSALGFHWAKRNPERVKGIAFMEFIRPIPTWDEWPEFARETFQAFRTTDVGRKLIIDQNVFIEGTLPMGVVRPLTEVEMDHYREPFLNPVDREPLWRFPNELPIAGEPANIVALVEEYMDWLHQSPVPKLLFWGTPGVLIPPAEAARLAKSLPNCKAVDIGPGLNLLQEDNPDLIGSEIARWLSTLEISG

SEQ ID NO: 1410 - protein, 277 aa, Synthetic construct
MFHYVDVGPRDGTPVLFLHGNPTSSYVWRNIIPHVAPTARCIAPDLIGMGKSDKPDLGYFFDDHVRFMDAFIEALGLEEVVLVIHDWGSALGFHWAKRNPERVKGIAFMEFIRPIPTWDEWPEFARETFQAFRTTDVGRKLIIDQNVFIEGTLPMGVVRPLTEVEMDHYREPFLNPVDREPLWRFPNELPIAGEPANIVALVEEYMDWLHQSPVPKLLFWGTPGVLIPPAEAARLAKSLPNCKAVDIGPGLNLLQEDNPDLIGSEIARWLSTLEISG

SEQ ID NO: 1411 - protein, 277 aa, Synthetic construct
MFHYVDVGPRDGTPVLFLHGNPTSSYVWRNIIPHVAPTGRCIAPDLIGMGKSDKPDLGYFFDDHVRFMDAFIEALGLEEVVLVIHDWGSALGFHWAKRNPERVKGIAFMEFIRPIPTWDEWPEFARETFQAFRTTDVGRKLIIDQNVFIEGTLPMGVVRPLTEVEMDHYREPFLNPVDREPLWRFPNELPIAGEPANIVALVEEYMDWLHQSPVPKLLFWGTPGVLIPPAEAARLAKSLPNCKAVDIGPGLNLLQEDNPDLIGSEIARWLSTLEISG

SEQ ID NO: 1412 - protein, 277 aa, Synthetic construct
MFHYVDVGPRDGTPVLFLHGNPTSSYVWRNIIPHVAPTSRCIAPDLIGMGKSDKPDLGYFFDDHVRFMDAFIEALGLEEVVLVIHDWGSALGFHWAKRNPERVKGIAFMEFIRPIPTWDEWPEFARETFQAFRTTDVGRKLIIDQNVFIEGTLPMGVVRPLTEVEMDHYREPFLNPVDREPLWRFPNELPIAGEPANIVALVEEYMDWLHQSPVPKLLFWGTPGVLIPPAEAARLAKSLPNCKAVDIGPGLNLLQEDNPDLIGSEIARWLSTLEISG

SEQ ID NO: 1413 - protein, 277 aa, Synthetic construct
MFHYVDVGPRDGTPVLFLHGNPTSSYVWRNIIPHVAPTCRCIAPDLIGMGKSDKPDLGYFFDDHVRFMDAFIEALGLEEVVLVIHDWGSALGFHWAKRNPERVKGIAFMEFIRPIPTWDEWPEFARETFQAFRTTDVGRKLIIDQNVFIEGTLPMGVVRPLTEVEMDHYREPFLNPVDREPLWRFPNELPIAGEPANIVALVEEYMDWLHQSPVPKLLFWGTPGVLIPPAEAARLAKSLPNCKAVDIGPGLNLLQEDNPDLIGSEIARWLSTLEISG

SEQ ID NO: 1414 - protein, 277 aa, Synthetic construct
MFHYVDVGPRDGTPVLFLHGNPTSSYVWRNIIPHVAPTRRCIAPDLIGMGKSDKPDLGYFFDDHVRFMDAFIEALGLEEVVLVIHDWGSALGFHWAKRNPERVKGIAFMEFIRPIPTWDEWPEFARETFQAFRTTDVGRKLIIDQNVFIEGTLPMGVVRPLTEVEMDHYREPFLNPVDREPLWRFPNELPIAGEPANIVALVEEYMDWLHQSPVPKLLFWGTPGVLIPPAEAARLAKSLPNCKAVDIGPGLNLLQEDNPDLIGSEIARWLSTLEISG

SEQ ID NO: 1415 - protein, 277 aa, Synthetic construct
MFHYVDVGPRDGTPVLFLHGNPTSSYVWRNIIPHVAPTVRCIAPDLIGMGKSDKPDLGYFFDDHVRFMDAFIEALGLEEVVLVIHDWGSALGFHWAKRNPERVKGIAFMEFIRPIPTWDEWPEFARETFQAFRTTDVGRKLIIDQNVFIEGTLPMGVVRPLTEVEMDHYREPFLNPVDREPLWRFPNELPIAGEPANIVALVEEYMDWLHQSPVPKLLFWGTPGVLIPPAEAARLAKSLPNCKAVDIGPGLNLLQEDNPDLIGSEIARWLSTLEISG

SEQ ID NO: 1416 - protein, 277 aa, Synthetic construct
MFHYVDVGPRDGTPVLFLHGNPTSSYVWRNIIPHVAPTHHCIAPDLIGMGKSDKPDLGYFFDDHVRFMDAFIEALGLEEVVLVIHDWGSALGFHWAKRNPERVKGIAFMEFIRPIPTWDEWPEFARETFQAFRTTDVGRKLIIDQNVFIEGTLPMGVVRPLTEVEMDHYREPFLNPVDREPLWRFPNELPIAGEPANIVALVEEYMDWLHQSPVPKLLFWGTPGVLIPPAEAARLAKSLPNCKAVDIGPGLNLLQEDNPDLIGSEIARWLSTLEISG

SEQ ID NO: 1417 - protein, 277 aa, Synthetic construct
MFHYVDVGPRDGTPVLFLHGNPTSSYVWRNIIPHVAPTHYCIAPDLIGMGKSDKPDLGYFFDDHVRFMDAFIEALGLEEVVLVIHDWGSALGFHWAKRNPERVKGIAFMEFIRPIPTWDEWPEFARETFQAFRTTDVGRKLIIDQNVFIEGTLPMGVVRPLTEVEMDHYREPFLNPVDREPLWRFPNELPIAGEPANIVALVEEYMDWLHQSPVPKLLFWGTPGVLIPPAEAARLAKSLPNCKAVDIGPGLNLLQEDNPDLIGSEIARWLSTLEISG

SEQ ID NO: 1418 - protein, 277 aa, Synthetic construct
MFHYVDVGPRDGTPVLFLHGNPTSSYVWRNIIPHVAPTHQCIAPDLIGMGKSDKPDLGYFFDDHVRFMDAFIEALGLEEVVLVIHDWGSALGFHWAKRNPERVKGIAFMEFIRPIPTWDEWPEFARETFQAFRTTDVGRKLIIDQNVFIEGTLPMGVVRPLTEVEMDHYREPFLNPVDREPLWRFPNELPIAGEPANIVALVEEYMDWLHQSPVPKLLFWGTPGVLIPPAEAARLAKSLPNCKAVDIGPGLNLLQEDNPDLIGSEIARWLSTLEISG

SEQ ID NO: 1419 - protein, 277 aa, Synthetic construct
MFHYVDVGPRDGTPVLFLHGNPTSSYVWRNIIPHVAPTHWCIAPDLIGMGKSDKPDLGYFFDDHVRFMDAFIEALGLEEVVLVIHDWGSALGFHWAKRNPERVKGIAFMEFIRPIPTWDEWPEFARETFQAFRTTDVGRKLIIDQNVFIEGTLPMGVVRPLTEVEMDHYREPFLNPVDREPLWRFPNELPIAGEPANIVALVEEYMDWLHQSPVPKLLFWGTPGVLIPPAEAARLAKSLPNCKAVDIGPGLNLLQEDNPDLIGSEIARWLSTLEISG

SEQ ID NO: 1420 - protein, 277 aa, Synthetic construct
MFHYVDVGPRDGTPVLFLHGNPTSSYVWRNIIPHVAPTHKCIAPDLIGMGKSDKPDLGYFFDDHVRFMDAFIEALGLEEVVLVIHDWGSALGFHWAKRNPERVKGIAFMEFIRPIPTWDEWPEFARETFQAFRTTDVGRKLIIDQNVFIEGTLPMGVVRPLTEVEMDHYREPFLNPVDREPLWRFPNELPIAGEPANIVALVEEYMDWLHQSPVPKLLFWGTPGVLIPPAEAARLAKSLPNCKAVDIGPGLNLLQEDNPDLIGSEIARWLSTLEISG

SEQ ID NO: 1421 - protein, 277 aa, Synthetic construct
MFHYVDVGPRDGTPVLFLHGNPTSSYVWRNIIPHVAPTHLCIAPDLIGMGKSDKPDLGYFFDDHVRFMDAFIEALGLEEVVLVIHDWGSALGFHWAKRNPERVKGIAFMEFIRPIPTWDEWPEFARETFQAFRTTDVGRKLIIDQNVFIEGTLPMGVVRPLTEVEMDHYREPFLNPVDREPLWRFPNELPIAGEPANIVALVEEYMDWLHQSPVPKLLFWGTPGVLIPPAEAARLAKSLPNCKAVDIGPGLNLLQEDNPDLIGSEIARWLSTLEISG

SEQ ID NO: 1422 - protein, 277 aa, Synthetic construct
MFHYVDVGPRDGTPVLFLHGNPTSSYVWRNIIPHVAPTHRAIAPDLIGMGKSDKPDLGYFFDDHVRFMDAFIEALGLEEVVLVIHDWGSALGFHWAKRNPERVKGIAFMEFIRPIPTWDEWPEFARETFQAFRTTDVGRKLIIDQNVFIEGTLPMGVVRPLTEVEMDHYREPFLNPVDREPLWRFPNELPIAGEPANIVALVEEYMDWLHQSPVPKLLFWGTPGVLIPPAEAARLAKSLPNCKAVDIGPGLNLLQEDNPDLIGSEIARWLSTLEISG

SEQ ID NO: 1423 - protein, 277 aa, Synthetic construct
MFHYVDVGPRDGTPVLFLHGNPTSSYVWRNIIPHVAPTHRVIAPDLIGMGKSDKPDLGYFFDDHVRFMDAFIEALGLEEVVLVIHDWGSALGFHWAKRNPERVKGIAFMEFIRPIPTWDEWPEFARETFQAFRTTDVGRKLIIDQNVFIEGTLPMGVVRPLTEVEMDHYREPFLNPVDREPLWRFPNELPIAGEPANIVALVEEYMDWLHQSPVPKLLFWGTPGVLIPPAEAARLAKSLPNCKAVDIGPGLNLLQEDNPDLIGSEIARWLSTLEISG

SEQ ID NO: 1424 - protein, 277 aa, Synthetic construct
MFHYVDVGPRDGTPVLFLHGNPTSSYVWRNIIPHVAPTHRLIAPDLIGMGKSDKPDLGYFFDDHVRFMDAFIEALGLEEVVLVIHDWGSALGFHWAKRNPERVKGIAFMEFIRPIPTWDEWPEFARETFQAFRTTDVGRKLIIDQNVFIEGTLPMGVVRPLTEVEMDHYREPFLNPVDREPLWRFPNELPIAGEPANIVALVEEYMDWLHQSPVPKLLFWGTPGVLIPPAEAARLAKSLPNCKAVDIGPGLNLLQEDNPDLIGSEIARWLSTLEISG

SEQ ID NO: 1425 - protein, 277 aa, Synthetic construct
MFHYVDVGPRDGTPVLFLHGNPTSSYVWRNIIPHVAPTHRTIAPDLIGMGKSDKPDLGYFFDDHVRFMDAFIEALGLEEVVLVIHDWGSALGFHWAKRNPERVKGIAFMEFIRPIPTWDEWPEFARETFQAFRTTDVGRKLIIDQNVFIEGTLPMGVVRPLTEVEMDHYREPFLNPVDREPLWRFPNELPIAGEPANIVALVEEYMDWLHQSPVPKLLFWGTPGVLIPPAEAARLAKSLPNCKAVDIGPGLNLLQEDNPDLIGSEIARWLSTLEISG

SEQ ID NO: 1426 - protein, 277 aa, Synthetic construct
MFHYVDVGPRDGTPVLFLHGNPTSSYVWRNIIPHVAPTHRSIAPDLIGMGKSDKPDLGYFFDDHVRFMDAFIEALGLEEVVLVIHDWGSALGFHWAKRNPERVKGIAFMEFIRPIPTWDEWPEFARETFQAFRTTDVGRKLIIDQNVFIEGTLPMGVVRPLTEVEMDHYREPFLNPVDREPLWRFPNELPIAGEPANIVALVEEYMDWLHQSPVPKLLFWGTPGVLIPPAEAARLAKSLPNCKAVDIGPGLNLLQEDNPDLIGSEIARWLSTLEISG

SEQ ID NO: 1427 - protein, 277 aa, Synthetic construct
MFHYVDVGPRDGTPVLFLHGNPTSSYVWRNIIPHVAPTHRIIAPDLIGMGKSDKPDLGYFFDDHVRFMDAFIEALGLEEVVLVIHDWGSALGFHWAKRNPERVKGIAFMEFIRPIPTWDEWPEFARETFQAFRTTDVGRKLIIDQNVFIEGTLPMGVVRPLTEVEMDHYREPFLNPVDREPLWRFPNELPIAGEPANIVALVEEYMDWLHQSPVPKLLFWGTPGVLIPPAEAARLAKSLPNCKAVDIGPGLNLLQEDNPDLIGSEIARWLSTLEISG

SEQ ID NO: 1428 - protein, 277 aa, Synthetic construct
MFHYVDVGPRDGTPVLFLHGNPTSSYVWRNIIPHVAPTHRCLAPDLIGMGKSDKPDLGYFFDDHVRFMDAFIEALGLEEVVLVIHDWGSALGFHWAKRNPERVKGIAFMEFIRPIPTWDEWPEFARETFQAFRTTDVGRKLIIDQNVFIEGTLPMGVVRPLTEVEMDHYREPFLNPVDREPLWRFPNELPIAGEPANIVALVEEYMDWLHQSPVPKLLFWGTPGVLIPPAEAARLAKSLPNCKAVDIGPGLNLLQEDNPDLIGSEIARWLSTLEISG

SEQ ID NO: 1429 - protein, 277 aa, Synthetic construct
MFHYVDVGPRDGTPVLFLHGNPTSSYVWRNIIPHVAPTHRCVAPDLIGMGKSDKPDLGYFFDDHVRFMDAFIEALGLEEVVLVIHDWGSALGFHWAKRNPERVKGIAFMEFIRPIPTWDEWPEFARETFQAFRTTDVGRKLIIDQNVFIEGTLPMGVVRPLTEVEMDHYREPFLNPVDREPLWRFPNELPIAGEPANIVALVEEYMDWLHQSPVPKLLFWGTPGVLIPPAEAARLAKSLPNCKAVDIGPGLNLLQEDNPDLIGSEIARWLSTLEISG

SEQ ID NO: 1430 - protein, 277 aa, Synthetic construct
MFHYVDVGPRDGTPVLFLHGNPTSSYVWRNIIPHVAPTHRCFAPDLIGMGKSDKPDLGYFFDDHVRFMDAFIEALGLEEVVLVIHDWGSALGFHWAKRNPERVKGIAFMEFIRPIPTWDEWPEFARETFQAFRTTDVGRKLIIDQNVFIEGTLPMGVVRPLTEVEMDHYREPFLNPVDREPLWRFPNELPIAGEPANIVALVEEYMDWLHQSPVPKLLFWGTPGVLIPPAEAARLAKSLPNCKAVDIGPGLNLLQEDNPDLIGSEIARWLSTLEISG

SEQ ID NO: 1431 - protein, 277 aa, Synthetic construct
MFHYVDVGPRDGTPVLFLHGNPTSSYVWRNIIPHVAPTHRCMAPDLIGMGKSDKPDLGYFFDDHVRFMDAFIEALGLEEVVLVIHDWGSALGFHWAKRNPERVKGIAFMEFIRPIPTWDEWPEFARETFQAFRTTDVGRKLIIDQNVFIEGTLPMGVVRPLTEVEMDHYREPFLNPVDREPLWRFPNELPIAGEPANIVALVEEYMDWLHQSPVPKLLFWGTPGVLIPPAEAARLAKSLPNCKAVDIGPGLNLLQEDNPDLIGSEIARWLSTLEISG

SEQ ID NO: 1432 - protein, 277 aa, Synthetic construct
MFHYVDVGPRDGTPVLFLHGNPTSSYVWRNIIPHVAPTHRCYAPDLIGMGKSDKPDLGYFFDDHVRFMDAFIEALGLEEVVLVIHDWGSALGFHWAKRNPERVKGIAFMEFIRPIPTWDEWPEFARETFQAFRTTDVGRKLIIDQNVFIEGTLPMGVVRPLTEVEMDHYREPFLNPVDREPLWRFPNELPIAGEPANIVALVEEYMDWLHQSPVPKLLFWGTPGVLIPPAEAARLAKSLPNCKAVDIGPGLNLLQEDNPDLIGSEIARWLSTLEISG

SEQ ID NO: 1433 - protein, 277 aa, Synthetic construct
MFHYVDVGPRDGTPVLFLHGNPTSSYVWRNIIPHVAPTHRCTAPDLIGMGKSDKPDLGYFFDDHVRFMDAFIEALGLEEVVLVIHDWGSALGFHWAKRNPERVKGIAFMEFIRPIPTWDEWPEFARETFQAFRTTDVGRKLIIDQNVFIEGTLPMGVVRPLTEVEMDHYREPFLNPVDREPLWRFPNELPIAGEPANIVALVEEYMDWLHQSPVPKLLFWGTPGVLIPPAEAARLAKSLPNCKAVDIGPGLNLLQEDNPDLIGSEIARWLSTLEISG

SEQ ID NO: 1434 - protein, 277 aa, Synthetic construct
MFHYVDVGPRDGTPVLFLHGNPTSSYVWRNIIPHVAPTHRCIVPDLIGMGKSDKPDLGYFFDDHVRFMDAFIEALGLEEVVLVIHDWGSALGFHWAKRNPERVKGIAFMEFIRPIPTWDEWPEFARETFQAFRTTDVGRKLIIDQNVFIEGTLPMGVVRPLTEVEMDHYREPFLNPVDREPLWRFPNELPIAGEPANIVALVEEYMDWLHQSPVPKLLFWGTPGVLIPPAEAARLAKSLPNCKAVDIGPGLNLLQEDNPDLIGSEIARWLSTLEISG

SEQ ID NO: 1435 - protein, 277 aa, Synthetic construct
MFHYVDVGPRDGTPVLFLHGNPTSSYVWRNIIPHVAPTHRCITPDLIGMGKSDKPDLGYFFDDHVRFMDAFIEALGLEEVVLVIHDWGSALGFHWAKRNPERVKGIAFMEFIRPIPTWDEWPEFARETFQAFRTTDVGRKLIIDQNVFIEGTLPMGVVRPLTEVEMDHYREPFLNPVDREPLWRFPNELPIAGEPANIVALVEEYMDWLHQSPVPKLLFWGTPGVLIPPAEAARLAKSLPNCKAVDIGPGLNLLQEDNPDLIGSEIARWLSTLEISG

SEQ ID NO: 1436 - protein, 277 aa, Synthetic construct
MFHYVDVGPRDGTPVLFLHGNPTSSYVWRNIIPHVAPTHRCISPDLIGMGKSDKPDLGYFFDDHVRFMDAFIEALGLEEVVLVIHDWGSALGFHWAKRNPERVKGIAFMEFIRPIPTWDEWPEFARETFQAFRTTDVGRKLIIDQNVFIEGTLPMGVVRPLTEVEMDHYREPFLNPVDREPLWRFPNELPIAGEPANIVALVEEYMDWLHQSPVPKLLFWGTPGVLIPPAEAARLAKSLPNCKAVDIGPGLNLLQEDNPDLIGSEIARWLSTLEISG

SEQ ID NO: 1437 - protein, 277 aa, Synthetic construct
MFHYVDVGPRDGTPVLFLHGNPTSSYVWRNIIPHVAPTHRCIGPDLIGMGKSDKPDLGYFFDDHVRFMDAFIEALGLEEVVLVIHDWGSALGFHWAKRNPERVKGIAFMEFIRPIPTWDEWPEFARETFQAFRTTDVGRKLIIDQNVFIEGTLPMGVVRPLTEVEMDHYREPFLNPVDREPLWRFPNELPIAGEPANIVALVEEYMDWLHQSPVPKLLFWGTPGVLIPPAEAARLAKSLPNCKAVDIGPGLNLLQEDNPDLIGSEIARWLSTLEISG

SEQ ID NO: 1438 - protein, 277 aa, Synthetic construct
MFHYVDVGPRDGTPVLFLHGNPTSSYVWRNIIPHVAPTHRCICPDLIGMGKSDKPDLGYFFDDHVRFMDAFIEALGLEEVVLVIHDWGSALGFHWAKRNPERVKGIAFMEFIRPIPTWDEWPEFARETFQAFRTTDVGRKLIIDQNVFIEGTLPMGVVRPLTEVEMDHYREPFLNPVDREPLWRFPNELPIAGEPANIVALVEEYMDWLHQSPVPKLLFWGTPGVLIPPAEAARLAKSLPNCKAVDIGPGLNLLQEDNPDLIGSEIARWLSTLEISG

SEQ ID NO: 1439 - protein, 277 aa, Synthetic construct
MFHYVDVGPRDGTPVLFLHGNPTSSYVWRNIIPHVAPTHRCIIPDLIGMGKSDKPDLGYFFDDHVRFMDAFIEALGLEEVVLVIHDWGSALGFHWAKRNPERVKGIAFMEFIRPIPTWDEWPEFARETFQAFRTTDVGRKLIIDQNVFIEGTLPMGVVRPLTEVEMDHYREPFLNPVDREPLWRFPNELPIAGEPANIVALVEEYMDWLHQSPVPKLLFWGTPGVLIPPAEAARLAKSLPNCKAVDIGPGLNLLQEDNPDLIGSEIARWLSTLEISG

SEQ ID NO: 1440 - protein, 277 aa, Synthetic construct
MFHYVDVGPRDGTPVLFLHGNPTSSYVWRNIIPHVAPTHRCIAVDLIGMGKSDKPDLGYFFDDHVRFMDAFIEALGLEEVVLVIHDWGSALGFHWAKRNPERVKGIAFMEFIRPIPTWDEWPEFARETFQAFRTTDVGRKLIIDQNVFIEGTLPMGVVRPLTEVEMDHYREPFLNPVDREPLWRFPNELPIAGEPANIVALVEEYMDWLHQSPVPKLLFWGTPGVLIPPAEAARLAKSLPNCKAVDIGPGLNLLQEDNPDLIGSEIARWLSTLEISG

SEQ ID NO: 1441 - protein, 277 aa, Synthetic construct
MFHYVDVGPRDGTPVLFLHGNPTSSYVWRNIIPHVAPTHRCIALDLIGMGKSDKPDLGYFFDDHVRFMDAFIEALGLEEVVLVIHDWGSALGFHWAKRNPERVKGIAFMEFIRPIPTWDEWPEFARETFQAFRTTDVGRKLIIDQNVFIEGTLPMGVVRPLTEVEMDHYREPFLNPVDREPLWRFPNELPIAGEPANIVALVEEYMDWLHQSPVPKLLFWGTPGVLIPPAEAARLAKSLPNCKAVDIGPGLNLLQEDNPDLIGSEIARWLSTLEISG

SEQ ID NO: 1442 - protein, 277 aa, Synthetic construct
MFHYVDVGPRDGTPVLFLHGNPTSSYVWRNIIPHVAPTHRCIAADLIGMGKSDKPDLGYFFDDHVRFMDAFIEALGLEEVVLVIHDWGSALGFHWAKRNPERVKGIAFMEFIRPIPTWDEWPEFARETFQAFRTTDVGRKLIIDQNVFIEGTLPMGVVRPLTEVEMDHYREPFLNPVDREPLWRFPNELPIAGEPANIVALVEEYMDWLHQSPVPKLLFWGTPGVLIPPAEAARLAKSLPNCKAVDIGPGLNLLQEDNPDLIGSEIARWLSTLEISG

SEQ ID NO: 1443 - protein, 277 aa, Synthetic construct
MFHYVDVGPRDGTPVLFLHGNPTSSYVWRNIIPHVAPTHRCIAIDLIGMGKSDKPDLGYFFDDHVRFMDAFIEALGLEEVVLVIHDWGSALGFHWAKRNPERVKGIAFMEFIRPIPTWDEWPEFARETFQAFRTTDVGRKLIIDQNVFIEGTLPMGVVRPLTEVEMDHYREPFLNPVDREPLWRFPNELPIAGEPANIVALVEEYMDWLHQSPVPKLLFWGTPGVLIPPAEAARLAKSLPNCKAVDIGPGLNLLQEDNPDLIGSEIARWLSTLEISG

SEQ ID NO: 1444 - protein, 277 aa, Synthetic construct
MFHYVDVGPRDGTPVLFLHGNPTSSYVWRNIIPHVAPTHRCIACDLIGMGKSDKPDLGYFFDDHVRFMDAFIEALGLEEVVLVIHDWGSALGFHWAKRNPERVKGIAFMEFIRPIPTWDEWPEFARETFQAFRTTDVGRKLIIDQNVFIEGTLPMGVVRPLTEVEMDHYREPFLNPVDREPLWRFPNELPIAGEPANIVALVEEYMDWLHQSPVPKLLFWGTPGVLIPPAEAARLAKSLPNCKAVDIGPGLNLLQEDNPDLIGSEIARWLSTLEISG

SEQ ID NO: 1445 - protein, 277 aa, Synthetic construct
MFHYVDVGPRDGTPVLFLHGNPTSSYVWRNIIPHVAPTHRCIAMDLIGMGKSDKPDLGYFFDDHVRFMDAFIEALGLEEVVLVIHDWGSALGFHWAKRNPERVKGIAFMEFIRPIPTWDEWPEFARETFQAFRTTDVGRKLIIDQNVFIEGTLPMGVVRPLTEVEMDHYREPFLNPVDREPLWRFPNELPIAGEPANIVALVEEYMDWLHQSPVPKLLFWGTPGVLIPPAEAARLAKSLPNCKAVDIGPGLNLLQEDNPDLIGSEIARWLSTLEISG

SEQ ID NO: 1446 - protein, 277 aa, Synthetic construct
MFHYVDVGPRDGTPVLFLHGNPTSSYVWRNIIPHVAPTHRCIAPELIGMGKSDKPDLGYFFDDHVRFMDAFIEALGLEEVVLVIHDWGSALGFHWAKRNPERVKGIAFMEFIRPIPTWDEWPEFARETFQAFRTTDVGRKLIIDQNVFIEGTLPMGVVRPLTEVEMDHYREPFLNPVDREPLWRFPNELPIAGEPANIVALVEEYMDWLHQSPVPKLLFWGTPGVLIPPAEAARLAKSLPNCKAVDIGPGLNLLQEDNPDLIGSEIARWLSTLEISG

SEQ ID NO: 1447 - protein, 277 aa, Synthetic construct
MFHYVDVGPRDGTPVLFLHGNPTSSYVWRNIIPHVAPTHRCIAPNLIGMGKSDKPDLGYFFDDHVRFMDAFIEALGLEEVVLVIHDWGSALGFHWAKRNPERVKGIAFMEFIRPIPTWDEWPEFARETFQAFRTTDVGRKLIIDQNVFIEGTLPMGVVRPLTEVEMDHYREPFLNPVDREPLWRFPNELPIAGEPANIVALVEEYMDWLHQSPVPKLLFWGTPGVLIPPAEAARLAKSLPNCKAVDIGPGLNLLQEDNPDLIGSEIARWLSTLEISG

SEQ ID NO: 1448 - protein, 277 aa, Synthetic construct
MFHYVDVGPRDGTPVLFLHGNPTSSYVWRNIIPHVAPTHRCIAPGLIGMGKSDKPDLGYFFDDHVRFMDAFIEALGLEEVVLVIHDWGSALGFHWAKRNPERVKGIAFMEFIRPIPTWDEWPEFARETFQAFRTTDVGRKLIIDQNVFIEGTLPMGVVRPLTEVEMDHYREPFLNPVDREPLWRFPNELPIAGEPANIVALVEEYMDWLHQSPVPKLLFWGTPGVLIPPAEAARLAKSLPNCKAVDIGPGLNLLQEDNPDLIGSEIARWLSTLEISG

SEQ ID NO: 1449 - protein, 277 aa, Synthetic construct
MFHYVDVGPRDGTPVLFLHGNPTSSYVWRNIIPHVAPTHRCIAPTLIGMGKSDKPDLGYFFDDHVRFMDAFIEALGLEEVVLVIHDWGSALGFHWAKRNPERVKGIAFMEFIRPIPTWDEWPEFARETFQAFRTTDVGRKLIIDQNVFIEGTLPMGVVRPLTEVEMDHYREPFLNPVDREPLWRFPNELPIAGEPANIVALVEEYMDWLHQSPVPKLLFWGTPGVLIPPAEAARLAKSLPNCKAVDIGPGLNLLQEDNPDLIGSEIARWLSTLEISG

SEQ ID NO: 1450 - protein, 277 aa, Synthetic construct
MFHYVDVGPRDGTPVLFLHGNPTSSYVWRNIIPHVAPTHRCIAPSLIGMGKSDKPDLGYFFDDHVRFMDAFIEALGLEEVVLVIHDWGSALGFHWAKRNPERVKGIAFMEFIRPIPTWDEWPEFARETFQAFRTTDVGRKLIIDQNVFIEGTLPMGVVRPLTEVEMDHYREPFLNPVDREPLWRFPNELPIAGEPANIVALVEEYMDWLHQSPVPKLLFWGTPGVLIPPAEAARLAKSLPNCKAVDIGPGLNLLQEDNPDLIGSEIARWLSTLEISG

SEQ ID NO: 1451 - protein, 277 aa, Synthetic construct
MFHYVDVGPRDGTPVLFLHGNPTSSYVWRNIIPHVAPTHRCIAPALIGMGKSDKPDLGYFFDDHVRFMDAFIEALGLEEVVLVIHDWGSALGFHWAKRNPERVKGIAFMEFIRPIPTWDEWPEFARETFQAFRTTDVGRKLIIDQNVFIEGTLPMGVVRPLTEVEMDHYREPFLNPVDREPLWRFPNELPIAGEPANIVALVEEYMDWLHQSPVPKLLFWGTPGVLIPPAEAARLAKSLPNCKAVDIGPGLNLLQEDNPDLIGSEIARWLSTLEISG

SEQ ID NO: 1452 - protein, 277 aa, Synthetic construct
MFHYVDVGPRDGTPVLFLHGNPTSSYVWRNIIPHVAPTHRCIAPDMIGMGKSDKPDLGYFFDDHVRFMDAFIEALGLEEVVLVIHDWGSALGFHWAKRNPERVKGIAFMEFIRPIPTWDEWPEFARETFQAFRTTDVGRKLIIDQNVFIEGTLPMGVVRPLTEVEMDHYREPFLNPVDREPLWRFPNELPIAGEPANIVALVEEYMDWLHQSPVPKLLFWGTPGVLIPPAEAARLAKSLPNCKAVDIGPGLNLLQEDNPDLIGSEIARWLSTLEISG

SEQ ID NO: 1453 - protein, 277 aa, Synthetic construct
MFHYVDVGPRDGTPVLFLHGNPTSSYVWRNIIPHVAPTHRCIAPDHIGMGKSDKPDLGYFFDDHVRFMDAFIEALGLEEVVLVIHDWGSALGFHWAKRNPERVKGIAFMEFIRPIPTWDEWPEFARETFQAFRTTDVGRKLIIDQNVFIEGTLPMGVVRPLTEVEMDHYREPFLNPVDREPLWRFPNELPIAGEPANIVALVEEYMDWLHQSPVPKLLFWGTPGVLIPPAEAARLAKSLPNCKAVDIGPGLNLLQEDNPDLIGSEIARWLSTLEISG

SEQ ID NO: 1454 - protein, 277 aa, Synthetic construct
MFHYVDVGPRDGTPVLFLHGNPTSSYVWRNIIPHVAPTHRCIAPDFIGMGKSDKPDLGYFFDDHVRFMDAFIEALGLEEVVLVIHDWGSALGFHWAKRNPERVKGIAFMEFIRPIPTWDEWPEFARETFQAFRTTDVGRKLIIDQNVFIEGTLPMGVVRPLTEVEMDHYREPFLNPVDREPLWRFPNELPIAGEPANIVALVEEYMDWLHQSPVPKLLFWGTPGVLIPPAEAARLAKSLPNCKAVDIGPGLNLLQEDNPDLIGSEIARWLSTLEISG

SEQ ID NO: 1455 - protein, 277 aa, Synthetic construct
MFHYVDVGPRDGTPVLFLHGNPTSSYVWRNIIPHVAPTHRCIAPDQIGMGKSDKPDLGYFFDDHVRFMDAFIEALGLEEVVLVIHDWGSALGFHWAKRNPERVKGIAFMEFIRPIPTWDEWPEFARETFQAFRTTDVGRKLIIDQNVFIEGTLPMGVVRPLTEVEMDHYREPFLNPVDREPLWRFPNELPIAGEPANIVALVEEYMDWLHQSPVPKLLFWGTPGVLIPPAEAARLAKSLPNCKAVDIGPGLNLLQEDNPDLIGSEIARWLSTLEISG

SEQ ID NO: 1456 - protein, 277 aa, Synthetic construct
MFHYVDVGPRDGTPVLFLHGNPTSSYVWRNIIPHVAPTHRCIAPDIIGMGKSDKPDLGYFFDDHVRFMDAFIEALGLEEVVLVIHDWGSALGFHWAKRNPERVKGIAFMEFIRPIPTWDEWPEFARETFQAFRTTDVGRKLIIDQNVFIEGTLPMGVVRPLTEVEMDHYREPFLNPVDREPLWRFPNELPIAGEPANIVALVEEYMDWLHQSPVPKLLFWGTPGVLIPPAEAARLAKSLPNCKAVDIGPGLNLLQEDNPDLIGSEIARWLSTLEISG

SEQ ID NO: 1457 - protein, 277 aa, Synthetic construct
MFHYVDVGPRDGTPVLFLHGNPTSSYVWRNIIPHVAPTHRCIAPDYIGMGKSDKPDLGYFFDDHVRFMDAFIEALGLEEVVLVIHDWGSALGFHWAKRNPERVKGIAFMEFIRPIPTWDEWPEFARETFQAFRTTDVGRKLIIDQNVFIEGTLPMGVVRPLTEVEMDHYREPFLNPVDREPLWRFPNELPIAGEPANIVALVEEYMDWLHQSPVPKLLFWGTPGVLIPPAEAARLAKSLPNCKAVDIGPGLNLLQEDNPDLIGSEIARWLSTLEISG

SEQ ID NO: 1458 - protein, 277 aa, Synthetic construct
MFHYVDVGPRDGTPVLFLHGNPTSSYVWRNIIPHVAPTHRCIAPDLVGMGKSDKPDLGYFFDDHVRFMDAFIEALGLEEVVLVIHDWGSALGFHWAKRNPERVKGIAFMEFIRPIPTWDEWPEFARETFQAFRTTDVGRKLIIDQNVFIEGTLPMGVVRPLTEVEMDHYREPFLNPVDREPLWRFPNELPIAGEPANIVALVEEYMDWLHQSPVPKLLFWGTPGVLIPPAEAARLAKSLPNCKAVDIGPGLNLLQEDNPDLIGSEIARWLSTLEISG

SEQ ID NO: 1459 - protein, 277 aa, Synthetic construct
MFHYVDVGPRDGTPVLFLHGNPTSSYVWRNIIPHVAPTHRCIAPDLLGMGKSDKPDLGYFFDDHVRFMDAFIEALGLEEVVLVIHDWGSALGFHWAKRNPERVKGIAFMEFIRPIPTWDEWPEFARETFQAFRTTDVGRKLIIDQNVFIEGTLPMGVVRPLTEVEMDHYREPFLNPVDREPLWRFPNELPIAGEPANIVALVEEYMDWLHQSPVPKLLFWGTPGVLIPPAEAARLAKSLPNCKAVDIGPGLNLLQEDNPDLIGSEIARWLSTLEISG

SEQ ID NO: 1460 - protein, 277 aa, Synthetic construct
MFHYVDVGPRDGTPVLFLHGNPTSSYVWRNIIPHVAPTHRCIAPDLMGMGKSDKPDLGYFFDDHVRFMDAFIEALGLEEVVLVIHDWGSALGFHWAKRNPERVKGIAFMEFIRPIPTWDEWPEFARETFQAFRTTDVGRKLIIDQNVFIEGTLPMGVVRPLTEVEMDHYREPFLNPVDREPLWRFPNELPIAGEPANIVALVEEYMDWLHQSPVPKLLFWGTPGVLIPPAEAARLAKSLPNCKAVDIGPGLNLLQEDNPDLIGSEIARWLSTLEISG

SEQ ID NO: 1461 - protein, 277 aa, Synthetic construct
MFHYVDVGPRDGTPVLFLHGNPTSSYVWRNIIPHVAPTHRCIAPDLAGMGKSDKPDLGYFFDDHVRFMDAFIEALGLEEVVLVIHDWGSALGFHWAKRNPERVKGIAFMEFIRPIPTWDEWPEFARETFQAFRTTDVGRKLIIDQNVFIEGTLPMGVVRPLTEVEMDHYREPFLNPVDREPLWRFPNELPIAGEPANIVALVEEYMDWLHQSPVPKLLFWGTPGVLIPPAEAARLAKSLPNCKAVDIGPGLNLLQEDNPDLIGSEIARWLSTLEISG

SEQ ID NO: 1462 - protein, 277 aa, Synthetic construct
MFHYVDVGPRDGTPVLFLHGNPTSSYVWRNIIPHVAPTHRCIAPDLPGMGKSDKPDLGYFFDDHVRFMDAFIEALGLEEVVLVIHDWGSALGFHWAKRNPERVKGIAFMEFIRPIPTWDEWPEFARETFQAFRTTDVGRKLIIDQNVFIEGTLPMGVVRPLTEVEMDHYREPFLNPVDREPLWRFPNELPIAGEPANIVALVEEYMDWLHQSPVPKLLFWGTPGVLIPPAEAARLAKSLPNCKAVDIGPGLNLLQEDNPDLIGSEIARWLSTLEISG

SEQ ID NO: 1463 - protein, 277 aa, Synthetic construct
MFHYVDVGPRDGTPVLFLHGNPTSSYVWRNIIPHVAPTHRCIAPDLFGMGKSDKPDLGYFFDDHVRFMDAFIEALGLEEVVLVIHDWGSALGFHWAKRNPERVKGIAFMEFIRPIPTWDEWPEFARETFQAFRTTDVGRKLIIDQNVFIEGTLPMGVVRPLTEVEMDHYREPFLNPVDREPLWRFPNELPIAGEPANIVALVEEYMDWLHQSPVPKLLFWGTPGVLIPPAEAARLAKSLPNCKAVDIGPGLNLLQEDNPDLIGSEIARWLSTLEISG

SEQ ID NO: 1464 - protein, 277 aa, Synthetic construct
MFHYVDVGPRDGTPVLFLHGNPTSSYVWRNIIPHVAPTHRCIAPDLIAMGKSDKPDLGYFFDDHVRFMDAFIEALGLEEVVLVIHDWGSALGFHWAKRNPERVKGIAFMEFIRPIPTWDEWPEFARETFQAFRTTDVGRKLIIDQNVFIEGTLPMGVVRPLTEVEMDHYREPFLNPVDREPLWRFPNELPIAGEPANIVALVEEYMDWLHQSPVPKLLFWGTPGVLIPPAEAARLAKSLPNCKAVDIGPGLNLLQEDNPDLIGSEIARWLSTLEISG

SEQ ID NO: 1465 - protein, 277 aa, Synthetic construct
MFHYVDVGPRDGTPVLFLHGNPTSSYVWRNIIPHVAPTHRCIAPDLISMGKSDKPDLGYFFDDHVRFMDAFIEALGLEEVVLVIHDWGSALGFHWAKRNPERVKGIAFMEFIRPIPTWDEWPEFARETFQAFRTTDVGRKLIIDQNVFIEGTLPMGVVRPLTEVEMDHYREPFLNPVDREPLWRFPNELPIAGEPANIVALVEEYMDWLHQSPVPKLLFWGTPGVLIPPAEAARLAKSLPNCKAVDIGPGLNLLQEDNPDLIGSEIARWLSTLEISG

SEQ ID NO: 1466 - protein, 277 aa, Synthetic construct
MFHYVDVGPRDGTPVLFLHGNPTSSYVWRNIIPHVAPTHRCIAPDLINMGKSDKPDLGYFFDDHVRFMDAFIEALGLEEVVLVIHDWGSALGFHWAKRNPERVKGIAFMEFIRPIPTWDEWPEFARETFQAFRTTDVGRKLIIDQNVFIEGTLPMGVVRPLTEVEMDHYREPFLNPVDREPLWRFPNELPIAGEPANIVALVEEYMDWLHQSPVPKLLFWGTPGVLIPPAEAARLAKSLPNCKAVDIGPGLNLLQEDNPDLIGSEIARWLSTLEISG

SEQ ID NO: 1467 - protein, 277 aa, Synthetic construct
MFHYVDVGPRDGTPVLFLHGNPTSSYVWRNIIPHVAPTHRCIAPDLIDMGKSDKPDLGYFFDDHVRFMDAFIEALGLEEVVLVIHDWGSALGFHWAKRNPERVKGIAFMEFIRPIPTWDEWPEFARETFQAFRTTDVGRKLIIDQNVFIEGTLPMGVVRPLTEVEMDHYREPFLNPVDREPLWRFPNELPIAGEPANIVALVEEYMDWLHQSPVPKLLFWGTPGVLIPPAEAARLAKSLPNCKAVDIGPGLNLLQEDNPDLIGSEIARWLSTLEISG

SEQ ID NO: 1468 - protein, 277 aa, Synthetic construct
MFHYVDVGPRDGTPVLFLHGNPTSSYVWRNIIPHVAPTHRCIAPDLICMGKSDKPDLGYFFDDHVRFMDAFIEALGLEEVVLVIHDWGSALGFHWAKRNPERVKGIAFMEFIRPIPTWDEWPEFARETFQAFRTTDVGRKLIIDQNVFIEGTLPMGVVRPLTEVEMDHYREPFLNPVDREPLWRFPNELPIAGEPANIVALVEEYMDWLHQSPVPKLLFWGTPGVLIPPAEAARLAKSLPNCKAVDIGPGLNLLQEDNPDLIGSEIARWLSTLEISG

SEQ ID NO: 1469 - protein, 277 aa, Synthetic construct
MFHYVDVGPRDGTPVLFLHGNPTSSYVWRNIIPHVAPTHRCIAPDLIEMGKSDKPDLGYFFDDHVRFMDAFIEALGLEEVVLVIHDWGSALGFHWAKRNPERVKGIAFMEFIRPIPTWDEWPEFARETFQAFRTTDVGRKLIIDQNVFIEGTLPMGVVRPLTEVEMDHYREPFLNPVDREPLWRFPNELPIAGEPANIVALVEEYMDWLHQSPVPKLLFWGTPGVLIPPAEAARLAKSLPNCKAVDIGPGLNLLQEDNPDLIGSEIARWLSTLEISG

SEQ ID NO: 1470 - protein, 277 aa, Synthetic construct
MFHYVDVGPRDGTPVLFLHGNPTSSYVWRNIIPHVAPTHRCIAPDLIGFGKSDKPDLGYFFDDHVRFMDAFIEALGLEEVVLVIHDWGSALGFHWAKRNPERVKGIAFMEFIRPIPTWDEWPEFARETFQAFRTTDVGRKLIIDQNVFIEGTLPMGVVRPLTEVEMDHYREPFLNPVDREPLWRFPNELPIAGEPANIVALVEEYMDWLHQSPVPKLLFWGTPGVLIPPAEAARLAKSLPNCKAVDIGPGLNLLQEDNPDLIGSEIARWLSTLEISG

SEQ ID NO: 1471 - protein, 277 aa, Synthetic construct
MFHYVDVGPRDGTPVLFLHGNPTSSYVWRNIIPHVAPTHRCIAPDLIGYGKSDKPDLGYFFDDHVRFMDAFIEALGLEEVVLVIHDWGSALGFHWAKRNPERVKGIAFMEFIRPIPTWDEWPEFARETFQAFRTTDVGRKLIIDQNVFIEGTLPMGVVRPLTEVEMDHYREPFLNPVDREPLWRFPNELPIAGEPANIVALVEEYMDWLHQSPVPKLLFWGTPGVLIPPAEAARLAKSLPNCKAVDIGPGLNLLQEDNPDLIGSEIARWLSTLEISG

SEQ ID NO: 1472 - protein, 277 aa, Synthetic construct
MFHYVDVGPRDGTPVLFLHGNPTSSYVWRNIIPHVAPTHRCIAPDLIGLGKSDKPDLGYFFDDHVRFMDAFIEALGLEEVVLVIHDWGSALGFHWAKRNPERVKGIAFMEFIRPIPTWDEWPEFARETFQAFRTTDVGRKLIIDQNVFIEGTLPMGVVRPLTEVEMDHYREPFLNPVDREPLWRFPNELPIAGEPANIVALVEEYMDWLHQSPVPKLLFWGTPGVLIPPAEAARLAKSLPNCKAVDIGPGLNLLQEDNPDLIGSEIARWLSTLEISG

SEQ ID NO: 1473 - protein, 277 aa, Synthetic construct
MFHYVDVGPRDGTPVLFLHGNPTSSYVWRNIIPHVAPTHRCIAPDLIGCGKSDKPDLGYFFDDHVRFMDAFIEALGLEEVVLVIHDWGSALGFHWAKRNPERVKGIAFMEFIRPIPTWDEWPEFARETFQAFRTTDVGRKLIIDQNVFIEGTLPMGVVRPLTEVEMDHYREPFLNPVDREPLWRFPNELPIAGEPANIVALVEEYMDWLHQSPVPKLLFWGTPGVLIPPAEAARLAKSLPNCKAVDIGPGLNLLQEDNPDLIGSEIARWLSTLEISG

SEQ ID NO: 1474 - protein, 277 aa, Synthetic construct
MFHYVDVGPRDGTPVLFLHGNPTSSYVWRNIIPHVAPTHRCIAPDLIGAGKSDKPDLGYFFDDHVRFMDAFIEALGLEEVVLVIHDWGSALGFHWAKRNPERVKGIAFMEFIRPIPTWDEWPEFARETFQAFRTTDVGRKLIIDQNVFIEGTLPMGVVRPLTEVEMDHYREPFLNPVDREPLWRFPNELPIAGEPANIVALVEEYMDWLHQSPVPKLLFWGTPGVLIPPAEAARLAKSLPNCKAVDIGPGLNLLQEDNPDLIGSEIARWLSTLEISG

SEQ ID NO: 1475 - protein, 277 aa, Synthetic construct
MFHYVDVGPRDGTPVLFLHGNPTSSYVWRNIIPHVAPTHRCIAPDLIGQGKSDKPDLGYFFDDHVRFMDAFIEALGLEEVVLVIHDWGSALGFHWAKRNPERVKGIAFMEFIRPIPTWDEWPEFARETFQAFRTTDVGRKLIIDQNVFIEGTLPMGVVRPLTEVEMDHYREPFLNPVDREPLWRFPNELPIAGEPANIVALVEEYMDWLHQSPVPKLLFWGTPGVLIPPAEAARLAKSLPNCKAVDIGPGLNLLQEDNPDLIGSEIARWLSTLEISG

SEQ ID NO: 1476 - protein, 277 aa, Synthetic construct
MFHYVDVGPRDGTPVLFLHGNPTSSYVWRNIIPHVAPTHRCIAPDLIGMAKSDKPDLGYFFDDHVRFMDAFIEALGLEEVVLVIHDWGSALGFHWAKRNPERVKGIAFMEFIRPIPTWDEWPEFARETFQAFRTTDVGRKLIIDQNVFIEGTLPMGVVRPLTEVEMDHYREPFLNPVDREPLWRFPNELPIAGEPANIVALVEEYMDWLHQSPVPKLLFWGTPGVLIPPAEAARLAKSLPNCKAVDIGPGLNLLQEDNPDLIGSEIARWLSTLEISG

SEQ ID NO: 1477 - protein, 277 aa, Synthetic construct
MFHYVDVGPRDGTPVLFLHGNPTSSYVWRNIIPHVAPTHRCIAPDLIGMSKSDKPDLGYFFDDHVRFMDAFIEALGLEEVVLVIHDWGSALGFHWAKRNPERVKGIAFMEFIRPIPTWDEWPEFARETFQAFRTTDVGRKLIIDQNVFIEGTLPMGVVRPLTEVEMDHYREPFLNPVDREPLWRFPNELPIAGEPANIVALVEEYMDWLHQSPVPKLLFWGTPGVLIPPAEAARLAKSLPNCKAVDIGPGLNLLQEDNPDLIGSEIARWLSTLEISG

SEQ ID NO: 1478 - protein, 277 aa, Synthetic construct
MFHYVDVGPRDGTPVLFLHGNPTSSYVWRNIIPHVAPTHRCIAPDLIGMNKSDKPDLGYFFDDHVRFMDAFIEALGLEEVVLVIHDWGSALGFHWAKRNPERVKGIAFMEFIRPIPTWDEWPEFARETFQAFRTTDVGRKLIIDQNVFIEGTLPMGVVRPLTEVEMDHYREPFLNPVDREPLWRFPNELPIAGEPANIVALVEEYMDWLHQSPVPKLLFWGTPGVLIPPAEAARLAKSLPNCKAVDIGPGLNLLQEDNPDLIGSEIARWLSTLEISG

SEQ ID NO: 1479 - protein, 277 aa, Synthetic construct
MFHYVDVGPRDGTPVLFLHGNPTSSYVWRNIIPHVAPTHRCIAPDLIGMDKSDKPDLGYFFDDHVRFMDAFIEALGLEEVVLVIHDWGSALGFHWAKRNPERVKGIAFMEFIRPIPTWDEWPEFARETFQAFRTTDVGRKLIIDQNVFIEGTLPMGVVRPLTEVEMDHYREPFLNPVDREPLWRFPNELPIAGEPANIVALVEEYMDWLHQSPVPKLLFWGTPGVLIPPAEAARLAKSLPNCKAVDIGPGLNLLQEDNPDLIGSEIARWLSTLEISG

SEQ ID NO: 1480 - protein, 277 aa, Synthetic construct
MFHYVDVGPRDGTPVLFLHGNPTSSYVWRNIIPHVAPTHRCIAPDLIGMEKSDKPDLGYFFDDHVRFMDAFIEALGLEEVVLVIHDWGSALGFHWAKRNPERVKGIAFMEFIRPIPTWDEWPEFARETFQAFRTTDVGRKLIIDQNVFIEGTLPMGVVRPLTEVEMDHYREPFLNPVDREPLWRFPNELPIAGEPANIVALVEEYMDWLHQSPVPKLLFWGTPGVLIPPAEAARLAKSLPNCKAVDIGPGLNLLQEDNPDLIGSEIARWLSTLEISG

SEQ ID NO: 1481 - protein, 277 aa, Synthetic construct
MFHYVDVGPRDGTPVLFLHGNPTSSYVWRNIIPHVAPTHRCIAPDLIGMRKSDKPDLGYFFDDHVRFMDAFIEALGLEEVVLVIHDWGSALGFHWAKRNPERVKGIAFMEFIRPIPTWDEWPEFARETFQAFRTTDVGRKLIIDQNVFIEGTLPMGVVRPLTEVEMDHYREPFLNPVDREPLWRFPNELPIAGEPANIVALVEEYMDWLHQSPVPKLLFWGTPGVLIPPAEAARLAKSLPNCKAVDIGPGLNLLQEDNPDLIGSEIARWLSTLEISG

SEQ ID NO: 1482 - protein, 277 aa, Synthetic construct
MFHYVDVGPRDGTPVLFLHGNPTSSYVWRNIIPHVAPTHRCIAPDLIGMGRSDKPDLGYFFDDHVRFMDAFIEALGLEEVVLVIHDWGSALGFHWAKRNPERVKGIAFMEFIRPIPTWDEWPEFARETFQAFRTTDVGRKLIIDQNVFIEGTLPMGVVRPLTEVEMDHYREPFLNPVDREPLWRFPNELPIAGEPANIVALVEEYMDWLHQSPVPKLLFWGTPGVLIPPAEAARLAKSLPNCKAVDIGPGLNLLQEDNPDLIGSEIARWLSTLEISG

SEQ ID NO: 1483 - protein, 277 aa, Synthetic construct
MFHYVDVGPRDGTPVLFLHGNPTSSYVWRNIIPHVAPTHRCIAPDLIGMGQSDKPDLGYFFDDHVRFMDAFIEALGLEEVVLVIHDWGSALGFHWAKRNPERVKGIAFMEFIRPIPTWDEWPEFARETFQAFRTTDVGRKLIIDQNVFIEGTLPMGVVRPLTEVEMDHYREPFLNPVDREPLWRFPNELPIAGEPANIVALVEEYMDWLHQSPVPKLLFWGTPGVLIPPAEAARLAKSLPNCKAVDIGPGLNLLQEDNPDLIGSEIARWLSTLEISG

SEQ ID NO: 1484 - protein, 277 aa, Synthetic construct
MFHYVDVGPRDGTPVLFLHGNPTSSYVWRNIIPHVAPTHRCIAPDLIGMGDSDKPDLGYFFDDHVRFMDAFIEALGLEEVVLVIHDWGSALGFHWAKRNPERVKGIAFMEFIRPIPTWDEWPEFARETFQAFRTTDVGRKLIIDQNVFIEGTLPMGVVRPLTEVEMDHYREPFLNPVDREPLWRFPNELPIAGEPANIVALVEEYMDWLHQSPVPKLLFWGTPGVLIPPAEAARLAKSLPNCKAVDIGPGLNLLQEDNPDLIGSEIARWLSTLEISG

SEQ ID NO: 1485 - protein, 277 aa, Synthetic construct
MFHYVDVGPRDGTPVLFLHGNPTSSYVWRNIIPHVAPTHRCIAPDLIGMGESDKPDLGYFFDDHVRFMDAFIEALGLEEVVLVIHDWGSALGFHWAKRNPERVKGIAFMEFIRPIPTWDEWPEFARETFQAFRTTDVGRKLIIDQNVFIEGTLPMGVVRPLTEVEMDHYREPFLNPVDREPLWRFPNELPIAGEPANIVALVEEYMDWLHQSPVPKLLFWGTPGVLIPPAEAARLAKSLPNCKAVDIGPGLNLLQEDNPDLIGSEIARWLSTLEISG

SEQ ID NO: 1486 - protein, 277 aa, Synthetic construct
MFHYVDVGPRDGTPVLFLHGNPTSSYVWRNIIPHVAPTHRCIAPDLIGMGASDKPDLGYFFDDHVRFMDAFIEALGLEEVVLVIHDWGSALGFHWAKRNPERVKGIAFMEFIRPIPTWDEWPEFARETFQAFRTTDVGRKLIIDQNVFIEGTLPMGVVRPLTEVEMDHYREPFLNPVDREPLWRFPNELPIAGEPANIVALVEEYMDWLHQSPVPKLLFWGTPGVLIPPAEAARLAKSLPNCKAVDIGPGLNLLQEDNPDLIGSEIARWLSTLEISG

SEQ ID NO: 1487 - protein, 277 aa, Synthetic construct
MFHYVDVGPRDGTPVLFLHGNPTSSYVWRNIIPHVAPTHRCIAPDLIGMGLSDKPDLGYFFDDHVRFMDAFIEALGLEEVVLVIHDWGSALGFHWAKRNPERVKGIAFMEFIRPIPTWDEWPEFARETFQAFRTTDVGRKLIIDQNVFIEGTLPMGVVRPLTEVEMDHYREPFLNPVDREPLWRFPNELPIAGEPANIVALVEEYMDWLHQSPVPKLLFWGTPGVLIPPAEAARLAKSLPNCKAVDIGPGLNLLQEDNPDLIGSEIARWLSTLEISG

SEQ ID NO: 1488 - protein, 277 aa, Synthetic construct
MFHYVDVGPRDGTPVLFLHGNPTSSYVWRNIIPHVAPTHRCIAPDLIGMGKTDKPDLGYFFDDHVRFMDAFIEALGLEEVVLVIHDWGSALGFHWAKRNPERVKGIAFMEFIRPIPTWDEWPEFARETFQAFRTTDVGRKLIIDQNVFIEGTLPMGVVRPLTEVEMDHYREPFLNPVDREPLWRFPNELPIAGEPANIVALVEEYMDWLHQSPVPKLLFWGTPGVLIPPAEAARLAKSLPNCKAVDIGPGLNLLQEDNPDLIGSEIARWLSTLEISG

SEQ ID NO: 1489 - protein, 277 aa, Synthetic construct
MFHYVDVGPRDGTPVLFLHGNPTSSYVWRNIIPHVAPTHRCIAPDLIGMGKADKPDLGYFFDDHVRFMDAFIEALGLEEVVLVIHDWGSALGFHWAKRNPERVKGIAFMEFIRPIPTWDEWPEFARETFQAFRTTDVGRKLIIDQNVFIEGTLPMGVVRPLTEVEMDHYREPFLNPVDREPLWRFPNELPIAGEPANIVALVEEYMDWLHQSPVPKLLFWGTPGVLIPPAEAARLAKSLPNCKAVDIGPGLNLLQEDNPDLIGSEIARWLSTLEISG

SEQ ID NO: 1490 - protein, 277 aa, Synthetic construct
MFHYVDVGPRDGTPVLFLHGNPTSSYVWRNIIPHVAPTHRCIAPDLIGMGKGDKPDLGYFFDDHVRFMDAFIEALGLEEVVLVIHDWGSALGFHWAKRNPERVKGIAFMEFIRPIPTWDEWPEFARETFQAFRTTDVGRKLIIDQNVFIEGTLPMGVVRPLTEVEMDHYREPFLNPVDREPLWRFPNELPIAGEPANIVALVEEYMDWLHQSPVPKLLFWGTPGVLIPPAEAARLAKSLPNCKAVDIGPGLNLLQEDNPDLIGSEIARWLSTLEISG

SEQ ID NO: 1491 - protein, 277 aa, Synthetic construct
MFHYVDVGPRDGTPVLFLHGNPTSSYVWRNIIPHVAPTHRCIAPDLIGMGKNDKPDLGYFFDDHVRFMDAFIEALGLEEVVLVIHDWGSALGFHWAKRNPERVKGIAFMEFIRPIPTWDEWPEFARETFQAFRTTDVGRKLIIDQNVFIEGTLPMGVVRPLTEVEMDHYREPFLNPVDREPLWRFPNELPIAGEPANIVALVEEYMDWLHQSPVPKLLFWGTPGVLIPPAEAARLAKSLPNCKAVDIGPGLNLLQEDNPDLIGSEIARWLSTLEISG

SEQ ID NO: 1492 - protein, 277 aa, Synthetic construct
MFHYVDVGPRDGTPVLFLHGNPTSSYVWRNIIPHVAPTHRCIAPDLIGMGKCDKPDLGYFFDDHVRFMDAFIEALGLEEVVLVIHDWGSALGFHWAKRNPERVKGIAFMEFIRPIPTWDEWPEFARETFQAFRTTDVGRKLIIDQNVFIEGTLPMGVVRPLTEVEMDHYREPFLNPVDREPLWRFPNELPIAGEPANIVALVEEYMDWLHQSPVPKLLFWGTPGVLIPPAEAARLAKSLPNCKAVDIGPGLNLLQEDNPDLIGSEIARWLSTLEISG

SEQ ID NO: 1493 - protein, 277 aa, Synthetic construct
MFHYVDVGPRDGTPVLFLHGNPTSSYVWRNIIPHVAPTHRCIAPDLIGMGKPDKPDLGYFFDDHVRFMDAFIEALGLEEVVLVIHDWGSALGFHWAKRNPERVKGIAFMEFIRPIPTWDEWPEFARETFQAFRTTDVGRKLIIDQNVFIEGTLPMGVVRPLTEVEMDHYREPFLNPVDREPLWRFPNELPIAGEPANIVALVEEYMDWLHQSPVPKLLFWGTPGVLIPPAEAARLAKSLPNCKAVDIGPGLNLLQEDNPDLIGSEIARWLSTLEISG

SEQ ID NO: 1494 - protein, 277 aa, Synthetic construct
MFHYVDVGPRDGTPVLFLHGNPTSSYVWRNIIPHVAPTHRCIAPDLIGMGKSGKPDLGYFFDDHVRFMDAFIEALGLEEVVLVIHDWGSALGFHWAKRNPERVKGIAFMEFIRPIPTWDEWPEFARETFQAFRTTDVGRKLIIDQNVFIEGTLPMGVVRPLTEVEMDHYREPFLNPVDREPLWRFPNELPIAGEPANIVALVEEYMDWLHQSPVPKLLFWGTPGVLIPPAEAARLAKSLPNCKAVDIGPGLNLLQEDNPDLIGSEIARWLSTLEISG

SEQ ID NO: 1495 - protein, 277 aa, Synthetic construct
MFHYVDVGPRDGTPVLFLHGNPTSSYVWRNIIPHVAPTHRCIAPDLIGMGKSEKPDLGYFFDDHVRFMDAFIEALGLEEVVLVIHDWGSALGFHWAKRNPERVKGIAFMEFIRPIPTWDEWPEFARETFQAFRTTDVGRKLIIDQNVFIEGTLPMGVVRPLTEVEMDHYREPFLNPVDREPLWRFPNELPIAGEPANIVALVEEYMDWLHQSPVPKLLFWGTPGVLIPPAEAARLAKSLPNCKAVDIGPGLNLLQEDNPDLIGSEIARWLSTLEISG

SEQ ID NO: 1496 - protein, 277 aa, Synthetic construct
MFHYVDVGPRDGTPVLFLHGNPTSSYVWRNIIPHVAPTHRCIAPDLIGMGKSSKPDLGYFFDDHVRFMDAFIEALGLEEVVLVIHDWGSALGFHWAKRNPERVKGIAFMEFIRPIPTWDEWPEFARETFQAFRTTDVGRKLIIDQNVFIEGTLPMGVVRPLTEVEMDHYREPFLNPVDREPLWRFPNELPIAGEPANIVALVEEYMDWLHQSPVPKLLFWGTPGVLIPPAEAARLAKSLPNCKAVDIGPGLNLLQEDNPDLIGSEIARWLSTLEISG

SEQ ID NO: 1497 - protein, 277 aa, Synthetic construct
MFHYVDVGPRDGTPVLFLHGNPTSSYVWRNIIPHVAPTHRCIAPDLIGMGKSAKPDLGYFFDDHVRFMDAFIEALGLEEVVLVIHDWGSALGFHWAKRNPERVKGIAFMEFIRPIPTWDEWPEFARETFQAFRTTDVGRKLIIDQNVFIEGTLPMGVVRPLTEVEMDHYREPFLNPVDREPLWRFPNELPIAGEPANIVALVEEYMDWLHQSPVPKLLFWGTPGVLIPPAEAARLAKSLPNCKAVDIGPGLNLLQEDNPDLIGSEIARWLSTLEISG

SEQ ID NO: 1498 - protein, 277 aa, Synthetic construct
MFHYVDVGPRDGTPVLFLHGNPTSSYVWRNIIPHVAPTHRCIAPDLIGMGKSQKPDLGYFFDDHVRFMDAFIEALGLEEVVLVIHDWGSALGFHWAKRNPERVKGIAFMEFIRPIPTWDEWPEFARETFQAFRTTDVGRKLIIDQNVFIEGTLPMGVVRPLTEVEMDHYREPFLNPVDREPLWRFPNELPIAGEPANIVALVEEYMDWLHQSPVPKLLFWGTPGVLIPPAEAARLAKSLPNCKAVDIGPGLNLLQEDNPDLIGSEIARWLSTLEISG

SEQ ID NO: 1499 - protein, 277 aa, Synthetic construct
MFHYVDVGPRDGTPVLFLHGNPTSSYVWRNIIPHVAPTHRCIAPDLIGMGKSTKPDLGYFFDDHVRFMDAFIEALGLEEVVLVIHDWGSALGFHWAKRNPERVKGIAFMEFIRPIPTWDEWPEFARETFQAFRTTDVGRKLIIDQNVFIEGTLPMGVVRPLTEVEMDHYREPFLNPVDREPLWRFPNELPIAGEPANIVALVEEYMDWLHQSPVPKLLFWGTPGVLIPPAEAARLAKSLPNCKAVDIGPGLNLLQEDNPDLIGSEIARWLSTLEISG

SEQ ID NO: 1500 - protein, 277 aa, Synthetic construct
MFHYVDVGPRDGTPVLFLHGNPTSSYVWRNIIPHVAPTHRCIAPDLIGMGKSDRPDLGYFFDDHVRFMDAFIEALGLEEVVLVIHDWGSALGFHWAKRNPERVKGIAFMEFIRPIPTWDEWPEFARETFQAFRTTDVGRKLIIDQNVFIEGTLPMGVVRPLTEVEMDHYREPFLNPVDREPLWRFPNELPIAGEPANIVALVEEYMDWLHQSPVPKLLFWGTPGVLIPPAEAARLAKSLPNCKAVDIGPGLNLLQEDNPDLIGSEIARWLSTLEISG

SEQ ID NO: 1501 - protein, 277 aa, Synthetic construct
MFHYVDVGPRDGTPVLFLHGNPTSSYVWRNIIPHVAPTHRCIAPDLIGMGKSDAPDLGYFFDDHVRFMDAFIEALGLEEVVLVIHDWGSALGFHWAKRNPERVKGIAFMEFIRPIPTWDEWPEFARETFQAFRTTDVGRKLIIDQNVFIEGTLPMGVVRPLTEVEMDHYREPFLNPVDREPLWRFPNELPIAGEPANIVALVEEYMDWLHQSPVPKLLFWGTPGVLIPPAEAARLAKSLPNCKAVDIGPGLNLLQEDNPDLIGSEIARWLSTLEISG

SEQ ID NO: 1502 - protein, 277 aa, Synthetic construct
MFHYVDVGPRDGTPVLFLHGNPTSSYVWRNIIPHVAPTHRCIAPDLIGMGKSDTPDLGYFFDDHVRFMDAFIEALGLEEVVLVIHDWGSALGFHWAKRNPERVKGIAFMEFIRPIPTWDEWPEFARETFQAFRTTDVGRKLIIDQNVFIEGTLPMGVVRPLTEVEMDHYREPFLNPVDREPLWRFPNELPIAGEPANIVALVEEYMDWLHQSPVPKLLFWGTPGVLIPPAEAARLAKSLPNCKAVDIGPGLNLLQEDNPDLIGSEIARWLSTLEISG

SEQ ID NO: 1503 - protein, 277 aa, Synthetic construct
MFHYVDVGPRDGTPVLFLHGNPTSSYVWRNIIPHVAPTHRCIAPDLIGMGKSDQPDLGYFFDDHVRFMDAFIEALGLEEVVLVIHDWGSALGFHWAKRNPERVKGIAFMEFIRPIPTWDEWPEFARETFQAFRTTDVGRKLIIDQNVFIEGTLPMGVVRPLTEVEMDHYREPFLNPVDREPLWRFPNELPIAGEPANIVALVEEYMDWLHQSPVPKLLFWGTPGVLIPPAEAARLAKSLPNCKAVDIGPGLNLLQEDNPDLIGSEIARWLSTLEISG

SEQ ID NO: 1504 - protein, 277 aa, Synthetic construct
MFHYVDVGPRDGTPVLFLHGNPTSSYVWRNIIPHVAPTHRCIAPDLIGMGKSDSPDLGYFFDDHVRFMDAFIEALGLEEVVLVIHDWGSALGFHWAKRNPERVKGIAFMEFIRPIPTWDEWPEFARETFQAFRTTDVGRKLIIDQNVFIEGTLPMGVVRPLTEVEMDHYREPFLNPVDREPLWRFPNELPIAGEPANIVALVEEYMDWLHQSPVPKLLFWGTPGVLIPPAEAARLAKSLPNCKAVDIGPGLNLLQEDNPDLIGSEIARWLSTLEISG

SEQ ID NO: 1505 - protein, 277 aa, Synthetic construct
MFHYVDVGPRDGTPVLFLHGNPTSSYVWRNIIPHVAPTHRCIAPDLIGMGKSDHPDLGYFFDDHVRFMDAFIEALGLEEVVLVIHDWGSALGFHWAKRNPERVKGIAFMEFIRPIPTWDEWPEFARETFQAFRTTDVGRKLIIDQNVFIEGTLPMGVVRPLTEVEMDHYREPFLNPVDREPLWRFPNELPIAGEPANIVALVEEYMDWLHQSPVPKLLFWGTPGVLIPPAEAARLAKSLPNCKAVDIGPGLNLLQEDNPDLIGSEIARWLSTLEISG

SEQ ID NO: 1506 - protein, 277 aa, Synthetic construct
MFHYVDVGPRDGTPVLFLHGNPTSSYVWRNIIPHVAPTHRCIAPDLIGMGKSDKADLGYFFDDHVRFMDAFIEALGLEEVVLVIHDWGSALGFHWAKRNPERVKGIAFMEFIRPIPTWDEWPEFARETFQAFRTTDVGRKLIIDQNVFIEGTLPMGVVRPLTEVEMDHYREPFLNPVDREPLWRFPNELPIAGEPANIVALVEEYMDWLHQSPVPKLLFWGTPGVLIPPAEAARLAKSLPNCKAVDIGPGLNLLQEDNPDLIGSEIARWLSTLEISG

SEQ ID NO: 1507 - protein, 277 aa, Synthetic construct
MFHYVDVGPRDGTPVLFLHGNPTSSYVWRNIIPHVAPTHRCIAPDLIGMGKSDKTDLGYFFDDHVRFMDAFIEALGLEEVVLVIHDWGSALGFHWAKRNPERVKGIAFMEFIRPIPTWDEWPEFARETFQAFRTTDVGRKLIIDQNVFIEGTLPMGVVRPLTEVEMDHYREPFLNPVDREPLWRFPNELPIAGEPANIVALVEEYMDWLHQSPVPKLLFWGTPGVLIPPAEAARLAKSLPNCKAVDIGPGLNLLQEDNPDLIGSEIARWLSTLEISG

SEQ ID NO: 1508 - protein, 277 aa, Synthetic construct
MFHYVDVGPRDGTPVLFLHGNPTSSYVWRNIIPHVAPTHRCIAPDLIGMGKSDKLDLGYFFDDHVRFMDAFIEALGLEEVVLVIHDWGSALGFHWAKRNPERVKGIAFMEFIRPIPTWDEWPEFARETFQAFRTTDVGRKLIIDQNVFIEGTLPMGVVRPLTEVEMDHYREPFLNPVDREPLWRFPNELPIAGEPANIVALVEEYMDWLHQSPVPKLLFWGTPGVLIPPAEAARLAKSLPNCKAVDIGPGLNLLQEDNPDLIGSEIARWLSTLEISG

SEQ ID NO: 1509 - protein, 277 aa, Synthetic construct
MFHYVDVGPRDGTPVLFLHGNPTSSYVWRNIIPHVAPTHRCIAPDLIGMGKSDKVDLGYFFDDHVRFMDAFIEALGLEEVVLVIHDWGSALGFHWAKRNPERVKGIAFMEFIRPIPTWDEWPEFARETFQAFRTTDVGRKLIIDQNVFIEGTLPMGVVRPLTEVEMDHYREPFLNPVDREPLWRFPNELPIAGEPANIVALVEEYMDWLHQSPVPKLLFWGTPGVLIPPAEAARLAKSLPNCKAVDIGPGLNLLQEDNPDLIGSEIARWLSTLEISG

SEQ ID NO: 1510 - protein, 277 aa, Synthetic construct
MFHYVDVGPRDGTPVLFLHGNPTSSYVWRNIIPHVAPTHRCIAPDLIGMGKSDKSDLGYFFDDHVRFMDAFIEALGLEEVVLVIHDWGSALGFHWAKRNPERVKGIAFMEFIRPIPTWDEWPEFARETFQAFRTTDVGRKLIIDQNVFIEGTLPMGVVRPLTEVEMDHYREPFLNPVDREPLWRFPNELPIAGEPANIVALVEEYMDWLHQSPVPKLLFWGTPGVLIPPAEAARLAKSLPNCKAVDIGPGLNLLQEDNPDLIGSEIARWLSTLEISG

SEQ ID NO: 1511 - protein, 277 aa, Synthetic construct
MFHYVDVGPRDGTPVLFLHGNPTSSYVWRNIIPHVAPTHRCIAPDLIGMGKSDKRDLGYFFDDHVRFMDAFIEALGLEEVVLVIHDWGSALGFHWAKRNPERVKGIAFMEFIRPIPTWDEWPEFARETFQAFRTTDVGRKLIIDQNVFIEGTLPMGVVRPLTEVEMDHYREPFLNPVDREPLWRFPNELPIAGEPANIVALVEEYMDWLHQSPVPKLLFWGTPGVLIPPAEAARLAKSLPNCKAVDIGPGLNLLQEDNPDLIGSEIARWLSTLEISG

SEQ ID NO: 1512 - protein, 277 aa, Synthetic construct
MFHYVDVGPRDGTPVLFLHGNPTSSYVWRNIIPHVAPTHRCIAPDLIGMGKSDKPELGYFFDDHVRFMDAFIEALGLEEVVLVIHDWGSALGFHWAKRNPERVKGIAFMEFIRPIPTWDEWPEFARETFQAFRTTDVGRKLIIDQNVFIEGTLPMGVVRPLTEVEMDHYREPFLNPVDREPLWRFPNELPIAGEPANIVALVEEYMDWLHQSPVPKLLFWGTPGVLIPPAEAARLAKSLPNCKAVDIGPGLNLLQEDNPDLIGSEIARWLSTLEISG

SEQ ID NO: 1513 - protein, 277 aa, Synthetic construct
MFHYVDVGPRDGTPVLFLHGNPTSSYVWRNIIPHVAPTHRCIAPDLIGMGKSDKPALGYFFDDHVRFMDAFIEALGLEEVVLVIHDWGSALGFHWAKRNPERVKGIAFMEFIRPIPTWDEWPEFARETFQAFRTTDVGRKLIIDQNVFIEGTLPMGVVRPLTEVEMDHYREPFLNPVDREPLWRFPNELPIAGEPANIVALVEEYMDWLHQSPVPKLLFWGTPGVLIPPAEAARLAKSLPNCKAVDIGPGLNLLQEDNPDLIGSEIARWLSTLEISG

SEQ ID NO: 1514 - protein, 277 aa, Synthetic construct
MFHYVDVGPRDGTPVLFLHGNPTSSYVWRNIIPHVAPTHRCIAPDLIGMGKSDKPSLGYFFDDHVRFMDAFIEALGLEEVVLVIHDWGSALGFHWAKRNPERVKGIAFMEFIRPIPTWDEWPEFARETFQAFRTTDVGRKLIIDQNVFIEGTLPMGVVRPLTEVEMDHYREPFLNPVDREPLWRFPNELPIAGEPANIVALVEEYMDWLHQSPVPKLLFWGTPGVLIPPAEAARLAKSLPNCKAVDIGPGLNLLQEDNPDLIGSEIARWLSTLEISG

SEQ ID NO: 1515 - protein, 277 aa, Synthetic construct
MFHYVDVGPRDGTPVLFLHGNPTSSYVWRNIIPHVAPTHRCIAPDLIGMGKSDKPNLGYFFDDHVRFMDAFIEALGLEEVVLVIHDWGSALGFHWAKRNPERVKGIAFMEFIRPIPTWDEWPEFARETFQAFRTTDVGRKLIIDQNVFIEGTLPMGVVRPLTEVEMDHYREPFLNPVDREPLWRFPNELPIAGEPANIVALVEEYMDWLHQSPVPKLLFWGTPGVLIPPAEAARLAKSLPNCKAVDIGPGLNLLQEDNPDLIGSEIARWLSTLEISG

SEQ ID NO: 1516 - protein, 277 aa, Synthetic construct
MFHYVDVGPRDGTPVLFLHGNPTSSYVWRNIIPHVAPTHRCIAPDLIGMGKSDKPGLGYFFDDHVRFMDAFIEALGLEEVVLVIHDWGSALGFHWAKRNPERVKGIAFMEFIRPIPTWDEWPEFARETFQAFRTTDVGRKLIIDQNVFIEGTLPMGVVRPLTEVEMDHYREPFLNPVDREPLWRFPNELPIAGEPANIVALVEEYMDWLHQSPVPKLLFWGTPGVLIPPAEAARLAKSLPNCKAVDIGPGLNLLQEDNPDLIGSEIARWLSTLEISG

SEQ ID NO: 1517 - protein, 277 aa, Synthetic construct
MFHYVDVGPRDGTPVLFLHGNPTSSYVWRNIIPHVAPTHRCIAPDLIGMGKSDKPPLGYFFDDHVRFMDAFIEALGLEEVVLVIHDWGSALGFHWAKRNPERVKGIAFMEFIRPIPTWDEWPEFARETFQAFRTTDVGRKLIIDQNVFIEGTLPMGVVRPLTEVEMDHYREPFLNPVDREPLWRFPNELPIAGEPANIVALVEEYMDWLHQSPVPKLLFWGTPGVLIPPAEAARLAKSLPNCKAVDIGPGLNLLQEDNPDLIGSEIARWLSTLEISG

SEQ ID NO: 1518 - protein, 277 aa, Synthetic construct
MFHYVDVGPRDGTPVLFLHGNPTSSYVWRNIIPHVAPTHRCIAPDLIGMGKSDKPDIGYFFDDHVRFMDAFIEALGLEEVVLVIHDWGSALGFHWAKRNPERVKGIAFMEFIRPIPTWDEWPEFARETFQAFRTTDVGRKLIIDQNVFIEGTLPMGVVRPLTEVEMDHYREPFLNPVDREPLWRFPNELPIAGEPANIVALVEEYMDWLHQSPVPKLLFWGTPGVLIPPAEAARLAKSLPNCKAVDIGPGLNLLQEDNPDLIGSEIARWLSTLEISG

SEQ ID NO: 1519 - protein, 277 aa, Synthetic construct
MFHYVDVGPRDGTPVLFLHGNPTSSYVWRNIIPHVAPTHRCIAPDLIGMGKSDKPDVGYFFDDHVRFMDAFIEALGLEEVVLVIHDWGSALGFHWAKRNPERVKGIAFMEFIRPIPTWDEWPEFARETFQAFRTTDVGRKLIIDQNVFIEGTLPMGVVRPLTEVEMDHYREPFLNPVDREPLWRFPNELPIAGEPANIVALVEEYMDWLHQSPVPKLLFWGTPGVLIPPAEAARLAKSLPNCKAVDIGPGLNLLQEDNPDLIGSEIARWLSTLEISG

SEQ ID NO: 1520 - protein, 277 aa, Synthetic construct
MFHYVDVGPRDGTPVLFLHGNPTSSYVWRNIIPHVAPTHRCIAPDLIGMGKSDKPDTGYFFDDHVRFMDAFIEALGLEEVVLVIHDWGSALGFHWAKRNPERVKGIAFMEFIRPIPTWDEWPEFARETFQAFRTTDVGRKLIIDQNVFIEGTLPMGVVRPLTEVEMDHYREPFLNPVDREPLWRFPNELPIAGEPANIVALVEEYMDWLHQSPVPKLLFWGTPGVLIPPAEAARLAKSLPNCKAVDIGPGLNLLQEDNPDLIGSEIARWLSTLEISG

SEQ ID NO: 1521 - protein, 277 aa, Synthetic construct
MFHYVDVGPRDGTPVLFLHGNPTSSYVWRNIIPHVAPTHRCIAPDLIGMGKSDKPDRGYFFDDHVRFMDAFIEALGLEEVVLVIHDWGSALGFHWAKRNPERVKGIAFMEFIRPIPTWDEWPEFARETFQAFRTTDVGRKLIIDQNVFIEGTLPMGVVRPLTEVEMDHYREPFLNPVDREPLWRFPNELPIAGEPANIVALVEEYMDWLHQSPVPKLLFWGTPGVLIPPAEAARLAKSLPNCKAVDIGPGLNLLQEDNPDLIGSEIARWLSTLEISG

SEQ ID NO: 1522 - protein, 277 aa, Synthetic construct
MFHYVDVGPRDGTPVLFLHGNPTSSYVWRNIIPHVAPTHRCIAPDLIGMGKSDKPDAGYFFDDHVRFMDAFIEALGLEEVVLVIHDWGSALGFHWAKRNPERVKGIAFMEFIRPIPTWDEWPEFARETFQAFRTTDVGRKLIIDQNVFIEGTLPMGVVRPLTEVEMDHYREPFLNPVDREPLWRFPNELPIAGEPANIVALVEEYMDWLHQSPVPKLLFWGTPGVLIPPAEAARLAKSLPNCKAVDIGPGLNLLQEDNPDLIGSEIARWLSTLEISG

SEQ ID NO: 1523 - protein, 277 aa, Synthetic construct
MFHYVDVGPRDGTPVLFLHGNPTSSYVWRNIIPHVAPTHRCIAPDLIGMGKSDKPDGGYFFDDHVRFMDAFIEALGLEEVVLVIHDWGSALGFHWAKRNPERVKGIAFMEFIRPIPTWDEWPEFARETFQAFRTTDVGRKLIIDQNVFIEGTLPMGVVRPLTEVEMDHYREPFLNPVDREPLWRFPNELPIAGEPANIVALVEEYMDWLHQSPVPKLLFWGTPGVLIPPAEAARLAKSLPNCKAVDIGPGLNLLQEDNPDLIGSEIARWLSTLEISG

SEQ ID NO: 1524 - protein, 277 aa, Synthetic construct
MFHYVDVGPRDGTPVLFLHGNPTSSYVWRNIIPHVAPTHRCIAPDLIGMGKSDKPDLAYFFDDHVRFMDAFIEALGLEEVVLVIHDWGSALGFHWAKRNPERVKGIAFMEFIRPIPTWDEWPEFARETFQAFRTTDVGRKLIIDQNVFIEGTLPMGVVRPLTEVEMDHYREPFLNPVDREPLWRFPNELPIAGEPANIVALVEEYMDWLHQSPVPKLLFWGTPGVLIPPAEAARLAKSLPNCKAVDIGPGLNLLQEDNPDLIGSEIARWLSTLEISG

SEQ ID NO: 1525 - protein, 277 aa, Synthetic construct
MFHYVDVGPRDGTPVLFLHGNPTSSYVWRNIIPHVAPTHRCIAPDLIGMGKSDKPDLPYFFDDHVRFMDAFIEALGLEEVVLVIHDWGSALGFHWAKRNPERVKGIAFMEFIRPIPTWDEWPEFARETFQAFRTTDVGRKLIIDQNVFIEGTLPMGVVRPLTEVEMDHYREPFLNPVDREPLWRFPNELPIAGEPANIVALVEEYMDWLHQSPVPKLLFWGTPGVLIPPAEAARLAKSLPNCKAVDIGPGLNLLQEDNPDLIGSEIARWLSTLEISG

SEQ ID NO: 1526 - protein, 277 aa, Synthetic construct
MFHYVDVGPRDGTPVLFLHGNPTSSYVWRNIIPHVAPTHRCIAPDLIGMGKSDKPDLSYFFDDHVRFMDAFIEALGLEEVVLVIHDWGSALGFHWAKRNPERVKGIAFMEFIRPIPTWDEWPEFARETFQAFRTTDVGRKLIIDQNVFIEGTLPMGVVRPLTEVEMDHYREPFLNPVDREPLWRFPNELPIAGEPANIVALVEEYMDWLHQSPVPKLLFWGTPGVLIPPAEAARLAKSLPNCKAVDIGPGLNLLQEDNPDLIGSEIARWLSTLEISG

SEQ ID NO: 1527 - protein, 277 aa, Synthetic construct
MFHYVDVGPRDGTPVLFLHGNPTSSYVWRNIIPHVAPTHRCIAPDLIGMGKSDKPDLDYFFDDHVRFMDAFIEALGLEEVVLVIHDWGSALGFHWAKRNPERVKGIAFMEFIRPIPTWDEWPEFARETFQAFRTTDVGRKLIIDQNVFIEGTLPMGVVRPLTEVEMDHYREPFLNPVDREPLWRFPNELPIAGEPANIVALVEEYMDWLHQSPVPKLLFWGTPGVLIPPAEAARLAKSLPNCKAVDIGPGLNLLQEDNPDLIGSEIARWLSTLEISG

SEQ ID NO: 1528 - protein, 277 aa, Synthetic construct
MFHYVDVGPRDGTPVLFLHGNPTSSYVWRNIIPHVAPTHRCIAPDLIGMGKSDKPDLEYFFDDHVRFMDAFIEALGLEEVVLVIHDWGSALGFHWAKRNPERVKGIAFMEFIRPIPTWDEWPEFARETFQAFRTTDVGRKLIIDQNVFIEGTLPMGVVRPLTEVEMDHYREPFLNPVDREPLWRFPNELPIAGEPANIVALVEEYMDWLHQSPVPKLLFWGTPGVLIPPAEAARLAKSLPNCKAVDIGPGLNLLQEDNPDLIGSEIARWLSTLEISG

SEQ ID NO: 1529 - protein, 277 aa, Synthetic construct
MFHYVDVGPRDGTPVLFLHGNPTSSYVWRNIIPHVAPTHRCIAPDLIGMGKSDKPDLTYFFDDHVRFMDAFIEALGLEEVVLVIHDWGSALGFHWAKRNPERVKGIAFMEFIRPIPTWDEWPEFARETFQAFRTTDVGRKLIIDQNVFIEGTLPMGVVRPLTEVEMDHYREPFLNPVDREPLWRFPNELPIAGEPANIVALVEEYMDWLHQSPVPKLLFWGTPGVLIPPAEAARLAKSLPNCKAVDIGPGLNLLQEDNPDLIGSEIARWLSTLEISG

SEQ ID NO: 1530 - protein, 277 aa, Synthetic construct
MFHYVDVGPRDGTPVLFLHGNPTSSYVWRNIIPHVAPTHRCIAPDLIGMGKSDKPDLGFFFDDHVRFMDAFIEALGLEEVVLVIHDWGSALGFHWAKRNPERVKGIAFMEFIRPIPTWDEWPEFARETFQAFRTTDVGRKLIIDQNVFIEGTLPMGVVRPLTEVEMDHYREPFLNPVDREPLWRFPNELPIAGEPANIVALVEEYMDWLHQSPVPKLLFWGTPGVLIPPAEAARLAKSLPNCKAVDIGPGLNLLQEDNPDLIGSEIARWLSTLEISG

SEQ ID NO: 1531 - protein, 277 aa, Synthetic construct
MFHYVDVGPRDGTPVLFLHGNPTSSYVWRNIIPHVAPTHRCIAPDLIGMGKSDKPDLGHFFDDHVRFMDAFIEALGLEEVVLVIHDWGSALGFHWAKRNPERVKGIAFMEFIRPIPTWDEWPEFARETFQAFRTTDVGRKLIIDQNVFIEGTLPMGVVRPLTEVEMDHYREPFLNPVDREPLWRFPNELPIAGEPANIVALVEEYMDWLHQSPVPKLLFWGTPGVLIPPAEAARLAKSLPNCKAVDIGPGLNLLQEDNPDLIGSEIARWLSTLEISG

SEQ ID NO: 1532 - protein, 277 aa, Synthetic construct
MFHYVDVGPRDGTPVLFLHGNPTSSYVWRNIIPHVAPTHRCIAPDLIGMGKSDKPDLGCFFDDHVRFMDAFIEALGLEEVVLVIHDWGSALGFHWAKRNPERVKGIAFMEFIRPIPTWDEWPEFARETFQAFRTTDVGRKLIIDQNVFIEGTLPMGVVRPLTEVEMDHYREPFLNPVDREPLWRFPNELPIAGEPANIVALVEEYMDWLHQSPVPKLLFWGTPGVLIPPAEAARLAKSLPNCKAVDIGPGLNLLQEDNPDLIGSEIARWLSTLEISG

SEQ ID NO: 1533 - protein, 277 aa, Synthetic construct
MFHYVDVGPRDGTPVLFLHGNPTSSYVWRNIIPHVAPTHRCIAPDLIGMGKSDKPDLGWFFDDHVRFMDAFIEALGLEEVVLVIHDWGSALGFHWAKRNPERVKGIAFMEFIRPIPTWDEWPEFARETFQAFRTTDVGRKLIIDQNVFIEGTLPMGVVRPLTEVEMDHYREPFLNPVDREPLWRFPNELPIAGEPANIVALVEEYMDWLHQSPVPKLLFWGTPGVLIPPAEAARLAKSLPNCKAVDIGPGLNLLQEDNPDLIGSEIARWLSTLEISG

SEQ ID NO: 1534 - protein, 277 aa, Synthetic construct
MFHYVDVGPRDGTPVLFLHGNPTSSYVWRNIIPHVAPTHRCIAPDLIGMGKSDKPDLGLFFDDHVRFMDAFIEALGLEEVVLVIHDWGSALGFHWAKRNPERVKGIAFMEFIRPIPTWDEWPEFARETFQAFRTTDVGRKLIIDQNVFIEGTLPMGVVRPLTEVEMDHYREPFLNPVDREPLWRFPNELPIAGEPANIVALVEEYMDWLHQSPVPKLLFWGTPGVLIPPAEAARLAKSLPNCKAVDIGPGLNLLQEDNPDLIGSEIARWLSTLEISG

SEQ ID NO: 1535 - protein, 277 aa, Synthetic construct
MFHYVDVGPRDGTPVLFLHGNPTSSYVWRNIIPHVAPTHRCIAPDLIGMGKSDKPDLGNFFDDHVRFMDAFIEALGLEEVVLVIHDWGSALGFHWAKRNPERVKGIAFMEFIRPIPTWDEWPEFARETFQAFRTTDVGRKLIIDQNVFIEGTLPMGVVRPLTEVEMDHYREPFLNPVDREPLWRFPNELPIAGEPANIVALVEEYMDWLHQSPVPKLLFWGTPGVLIPPAEAARLAKSLPNCKAVDIGPGLNLLQEDNPDLIGSEIARWLSTLEISG

SEQ ID NO: 1536 - protein, 277 aa, Synthetic construct
MFHYVDVGPRDGTPVLFLHGNPTSSYVWRNIIPHVAPTHRCIAPDLIGMGKSDKPDLGYRFDDHVRFMDAFIEALGLEEVVLVIHDWGSALGFHWAKRNPERVKGIAFMEFIRPIPTWDEWPEFARETFQAFRTTDVGRKLIIDQNVFIEGTLPMGVVRPLTEVEMDHYREPFLNPVDREPLWRFPNELPIAGEPANIVALVEEYMDWLHQSPVPKLLFWGTPGVLIPPAEAARLAKSLPNCKAVDIGPGLNLLQEDNPDLIGSEIARWLSTLEISG

SEQ ID NO: 1537 - protein, 277 aa, Synthetic construct
MFHYVDVGPRDGTPVLFLHGNPTSSYVWRNIIPHVAPTHRCIAPDLIGMGKSDKPDLGYTFDDHVRFMDAFIEALGLEEVVLVIHDWGSALGFHWAKRNPERVKGIAFMEFIRPIPTWDEWPEFARETFQAFRTTDVGRKLIIDQNVFIEGTLPMGVVRPLTEVEMDHYREPFLNPVDREPLWRFPNELPIAGEPANIVALVEEYMDWLHQSPVPKLLFWGTPGVLIPPAEAARLAKSLPNCKAVDIGPGLNLLQEDNPDLIGSEIARWLSTLEISG

SEQ ID NO: 1538 - protein, 277 aa, Synthetic construct
MFHYVDVGPRDGTPVLFLHGNPTSSYVWRNIIPHVAPTHRCIAPDLIGMGKSDKPDLGYSFDDHVRFMDAFIEALGLEEVVLVIHDWGSALGFHWAKRNPERVKGIAFMEFIRPIPTWDEWPEFARETFQAFRTTDVGRKLIIDQNVFIEGTLPMGVVRPLTEVEMDHYREPFLNPVDREPLWRFPNELPIAGEPANIVALVEEYMDWLHQSPVPKLLFWGTPGVLIPPAEAARLAKSLPNCKAVDIGPGLNLLQEDNPDLIGSEIARWLSTLEISG

SEQ ID NO: 1539 - protein, 277 aa, Synthetic construct
MFHYVDVGPRDGTPVLFLHGNPTSSYVWRNIIPHVAPTHRCIAPDLIGMGKSDKPDLGYAFDDHVRFMDAFIEALGLEEVVLVIHDWGSALGFHWAKRNPERVKGIAFMEFIRPIPTWDEWPEFARETFQAFRTTDVGRKLIIDQNVFIEGTLPMGVVRPLTEVEMDHYREPFLNPVDREPLWRFPNELPIAGEPANIVALVEEYMDWLHQSPVPKLLFWGTPGVLIPPAEAARLAKSLPNCKAVDIGPGLNLLQEDNPDLIGSEIARWLSTLEISG

SEQ ID NO: 1540 - protein, 277 aa, Synthetic construct
MFHYVDVGPRDGTPVLFLHGNPTSSYVWRNIIPHVAPTHRCIAPDLIGMGKSDKPDLGYKFDDHVRFMDAFIEALGLEEVVLVIHDWGSALGFHWAKRNPERVKGIAFMEFIRPIPTWDEWPEFARETFQAFRTTDVGRKLIIDQNVFIEGTLPMGVVRPLTEVEMDHYREPFLNPVDREPLWRFPNELPIAGEPANIVALVEEYMDWLHQSPVPKLLFWGTPGVLIPPAEAARLAKSLPNCKAVDIGPGLNLLQEDNPDLIGSEIARWLSTLEISG

SEQ ID NO: 1541 - protein, 277 aa, Synthetic construct
MFHYVDVGPRDGTPVLFLHGNPTSSYVWRNIIPHVAPTHRCIAPDLIGMGKSDKPDLGYVFDDHVRFMDAFIEALGLEEVVLVIHDWGSALGFHWAKRNPERVKGIAFMEFIRPIPTWDEWPEFARETFQAFRTTDVGRKLIIDQNVFIEGTLPMGVVRPLTEVEMDHYREPFLNPVDREPLWRFPNELPIAGEPANIVALVEEYMDWLHQSPVPKLLFWGTPGVLIPPAEAARLAKSLPNCKAVDIGPGLNLLQEDNPDLIGSEIARWLSTLEISG

SEQ ID NO: 1542 - protein, 277 aa, Synthetic construct
MFHYVDVGPRDGTPVLFLHGNPTSSYVWRNIIPHVAPTHRCIAPDLIGMGKSDKPDLGYFLDDHVRFMDAFIEALGLEEVVLVIHDWGSALGFHWAKRNPERVKGIAFMEFIRPIPTWDEWPEFARETFQAFRTTDVGRKLIIDQNVFIEGTLPMGVVRPLTEVEMDHYREPFLNPVDREPLWRFPNELPIAGEPANIVALVEEYMDWLHQSPVPKLLFWGTPGVLIPPAEAARLAKSLPNCKAVDIGPGLNLLQEDNPDLIGSEIARWLSTLEISG

SEQ ID NO: 1543 - protein, 277 aa, Synthetic construct
MFHYVDVGPRDGTPVLFLHGNPTSSYVWRNIIPHVAPTHRCIAPDLIGMGKSDKPDLGYFYDDHVRFMDAFIEALGLEEVVLVIHDWGSALGFHWAKRNPERVKGIAFMEFIRPIPTWDEWPEFARETFQAFRTTDVGRKLIIDQNVFIEGTLPMGVVRPLTEVEMDHYREPFLNPVDREPLWRFPNELPIAGEPANIVALVEEYMDWLHQSPVPKLLFWGTPGVLIPPAEAARLAKSLPNCKAVDIGPGLNLLQEDNPDLIGSEIARWLSTLEISG

SEQ ID NO: 1544 - protein, 277 aa, Synthetic construct
MFHYVDVGPRDGTPVLFLHGNPTSSYVWRNIIPHVAPTHRCIAPDLIGMGKSDKPDLGYFIDDHVRFMDAFIEALGLEEVVLVIHDWGSALGFHWAKRNPERVKGIAFMEFIRPIPTWDEWPEFARETFQAFRTTDVGRKLIIDQNVFIEGTLPMGVVRPLTEVEMDHYREPFLNPVDREPLWRFPNELPIAGEPANIVALVEEYMDWLHQSPVPKLLFWGTPGVLIPPAEAARLAKSLPNCKAVDIGPGLNLLQEDNPDLIGSEIARWLSTLEISG

SEQ ID NO: 1545 - protein, 277 aa, Synthetic construct
MFHYVDVGPRDGTPVLFLHGNPTSSYVWRNIIPHVAPTHRCIAPDLIGMGKSDKPDLGYFVDDHVRFMDAFIEALGLEEVVLVIHDWGSALGFHWAKRNPERVKGIAFMEFIRPIPTWDEWPEFARETFQAFRTTDVGRKLIIDQNVFIEGTLPMGVVRPLTEVEMDHYREPFLNPVDREPLWRFPNELPIAGEPANIVALVEEYMDWLHQSPVPKLLFWGTPGVLIPPAEAARLAKSLPNCKAVDIGPGLNLLQEDNPDLIGSEIARWLSTLEISG

SEQ ID NO: 1546 - protein, 277 aa, Synthetic construct
MFHYVDVGPRDGTPVLFLHGNPTSSYVWRNIIPHVAPTHRCIAPDLIGMGKSDKPDLGYFMDDHVRFMDAFIEALGLEEVVLVIHDWGSALGFHWAKRNPERVKGIAFMEFIRPIPTWDEWPEFARETFQAFRTTDVGRKLIIDQNVFIEGTLPMGVVRPLTEVEMDHYREPFLNPVDREPLWRFPNELPIAGEPANIVALVEEYMDWLHQSPVPKLLFWGTPGVLIPPAEAARLAKSLPNCKAVDIGPGLNLLQEDNPDLIGSEIARWLSTLEISG

SEQ ID NO: 1547 - protein, 277 aa, Synthetic construct
MFHYVDVGPRDGTPVLFLHGNPTSSYVWRNIIPHVAPTHRCIAPDLIGMGKSDKPDLGYFADDHVRFMDAFIEALGLEEVVLVIHDWGSALGFHWAKRNPERVKGIAFMEFIRPIPTWDEWPEFARETFQAFRTTDVGRKLIIDQNVFIEGTLPMGVVRPLTEVEMDHYREPFLNPVDREPLWRFPNELPIAGEPANIVALVEEYMDWLHQSPVPKLLFWGTPGVLIPPAEAARLAKSLPNCKAVDIGPGLNLLQEDNPDLIGSEIARWLSTLEISG

SEQ ID NO: 1548 - protein, 277 aa, Synthetic construct
MFHYVDVGPRDGTPVLFLHGNPTSSYVWRNIIPHVAPTHRCIAPDLIGMGKSDKPDLGYFFADHVRFMDAFIEALGLEEVVLVIHDWGSALGFHWAKRNPERVKGIAFMEFIRPIPTWDEWPEFARETFQAFRTTDVGRKLIIDQNVFIEGTLPMGVVRPLTEVEMDHYREPFLNPVDREPLWRFPNELPIAGEPANIVALVEEYMDWLHQSPVPKLLFWGTPGVLIPPAEAARLAKSLPNCKAVDIGPGLNLLQEDNPDLIGSEIARWLSTLEISG

SEQ ID NO: 1549 - protein, 277 aa, Synthetic construct
MFHYVDVGPRDGTPVLFLHGNPTSSYVWRNIIPHVAPTHRCIAPDLIGMGKSDKPDLGYFFEDHVRFMDAFIEALGLEEVVLVIHDWGSALGFHWAKRNPERVKGIAFMEFIRPIPTWDEWPEFARETFQAFRTTDVGRKLIIDQNVFIEGTLPMGVVRPLTEVEMDHYREPFLNPVDREPLWRFPNELPIAGEPANIVALVEEYMDWLHQSPVPKLLFWGTPGVLIPPAEAARLAKSLPNCKAVDIGPGLNLLQEDNPDLIGSEIARWLSTLEISG

SEQ ID NO: 1550 - protein, 277 aa, Synthetic construct
MFHYVDVGPRDGTPVLFLHGNPTSSYVWRNIIPHVAPTHRCIAPDLIGMGKSDKPDLGYFFVDHVRFMDAFIEALGLEEVVLVIHDWGSALGFHWAKRNPERVKGIAFMEFIRPIPTWDEWPEFARETFQAFRTTDVGRKLIIDQNVFIEGTLPMGVVRPLTEVEMDHYREPFLNPVDREPLWRFPNELPIAGEPANIVALVEEYMDWLHQSPVPKLLFWGTPGVLIPPAEAARLAKSLPNCKAVDIGPGLNLLQEDNPDLIGSEIARWLSTLEISG

SEQ ID NO: 1551 - protein, 277 aa, Synthetic construct
MFHYVDVGPRDGTPVLFLHGNPTSSYVWRNIIPHVAPTHRCIAPDLIGMGKSDKPDLGYFFFDHVRFMDAFIEALGLEEVVLVIHDWGSALGFHWAKRNPERVKGIAFMEFIRPIPTWDEWPEFARETFQAFRTTDVGRKLIIDQNVFIEGTLPMGVVRPLTEVEMDHYREPFLNPVDREPLWRFPNELPIAGEPANIVALVEEYMDWLHQSPVPKLLFWGTPGVLIPPAEAARLAKSLPNCKAVDIGPGLNLLQEDNPDLIGSEIARWLSTLEISG

SEQ ID NO: 1552 - protein, 277 aa, Synthetic construct
MFHYVDVGPRDGTPVLFLHGNPTSSYVWRNIIPHVAPTHRCIAPDLIGMGKSDKPDLGYFFLDHVRFMDAFIEALGLEEVVLVIHDWGSALGFHWAKRNPERVKGIAFMEFIRPIPTWDEWPEFARETFQAFRTTDVGRKLIIDQNVFIEGTLPMGVVRPLTEVEMDHYREPFLNPVDREPLWRFPNELPIAGEPANIVALVEEYMDWLHQSPVPKLLFWGTPGVLIPPAEAARLAKSLPNCKAVDIGPGLNLLQEDNPDLIGSEIARWLSTLEISG

SEQ ID NO: 1553 - protein, 277 aa, Synthetic construct
MFHYVDVGPRDGTPVLFLHGNPTSSYVWRNIIPHVAPTHRCIAPDLIGMGKSDKPDLGYFFTDHVRFMDAFIEALGLEEVVLVIHDWGSALGFHWAKRNPERVKGIAFMEFIRPIPTWDEWPEFARETFQAFRTTDVGRKLIIDQNVFIEGTLPMGVVRPLTEVEMDHYREPFLNPVDREPLWRFPNELPIAGEPANIVALVEEYMDWLHQSPVPKLLFWGTPGVLIPPAEAARLAKSLPNCKAVDIGPGLNLLQEDNPDLIGSEIARWLSTLEISG

SEQ ID NO: 1554 - protein, 277 aa, Synthetic construct
MFHYVDVGPRDGTPVLFLHGNPTSSYVWRNIIPHVAPTHRCIAPDLIGMGKSDKPDLGYFFDEHVRFMDAFIEALGLEEVVLVIHDWGSALGFHWAKRNPERVKGIAFMEFIRPIPTWDEWPEFARETFQAFRTTDVGRKLIIDQNVFIEGTLPMGVVRPLTEVEMDHYREPFLNPVDREPLWRFPNELPIAGEPANIVALVEEYMDWLHQSPVPKLLFWGTPGVLIPPAEAARLAKSLPNCKAVDIGPGLNLLQEDNPDLIGSEIARWLSTLEISG

SEQ ID NO: 1555 - protein, 277 aa, Synthetic construct
MFHYVDVGPRDGTPVLFLHGNPTSSYVWRNIIPHVAPTHRCIAPDLIGMGKSDKPDLGYFFDAHVRFMDAFIEALGLEEVVLVIHDWGSALGFHWAKRNPERVKGIAFMEFIRPIPTWDEWPEFARETFQAFRTTDVGRKLIIDQNVFIEGTLPMGVVRPLTEVEMDHYREPFLNPVDREPLWRFPNELPIAGEPANIVALVEEYMDWLHQSPVPKLLFWGTPGVLIPPAEAARLAKSLPNCKAVDIGPGLNLLQEDNPDLIGSEIARWLSTLEISG

SEQ ID NO: 1556 - protein, 277 aa, Synthetic construct
MFHYVDVGPRDGTPVLFLHGNPTSSYVWRNIIPHVAPTHRCIAPDLIGMGKSDKPDLGYFFDQHVRFMDAFIEALGLEEVVLVIHDWGSALGFHWAKRNPERVKGIAFMEFIRPIPTWDEWPEFARETFQAFRTTDVGRKLIIDQNVFIEGTLPMGVVRPLTEVEMDHYREPFLNPVDREPLWRFPNELPIAGEPANIVALVEEYMDWLHQSPVPKLLFWGTPGVLIPPAEAARLAKSLPNCKAVDIGPGLNLLQEDNPDLIGSEIARWLSTLEISG

SEQ ID NO: 1557 - protein, 277 aa, Synthetic construct
MFHYVDVGPRDGTPVLFLHGNPTSSYVWRNIIPHVAPTHRCIAPDLIGMGKSDKPDLGYFFDNHVRFMDAFIEALGLEEVVLVIHDWGSALGFHWAKRNPERVKGIAFMEFIRPIPTWDEWPEFARETFQAFRTTDVGRKLIIDQNVFIEGTLPMGVVRPLTEVEMDHYREPFLNPVDREPLWRFPNELPIAGEPANIVALVEEYMDWLHQSPVPKLLFWGTPGVLIPPAEAARLAKSLPNCKAVDIGPGLNLLQEDNPDLIGSEIARWLSTLEISG

SEQ ID NO: 1558 - protein, 277 aa, Synthetic construct
MFHYVDVGPRDGTPVLFLHGNPTSSYVWRNIIPHVAPTHRCIAPDLIGMGKSDKPDLGYFFDTHVRFMDAFIEALGLEEVVLVIHDWGSALGFHWAKRNPERVKGIAFMEFIRPIPTWDEWPEFARETFQAFRTTDVGRKLIIDQNVFIEGTLPMGVVRPLTEVEMDHYREPFLNPVDREPLWRFPNELPIAGEPANIVALVEEYMDWLHQSPVPKLLFWGTPGVLIPPAEAARLAKSLPNCKAVDIGPGLNLLQEDNPDLIGSEIARWLSTLEISG

SEQ ID NO: 1559 - protein, 277 aa, Synthetic construct
MFHYVDVGPRDGTPVLFLHGNPTSSYVWRNIIPHVAPTHRCIAPDLIGMGKSDKPDLGYFFDHHVRFMDAFIEALGLEEVVLVIHDWGSALGFHWAKRNPERVKGIAFMEFIRPIPTWDEWPEFARETFQAFRTTDVGRKLIIDQNVFIEGTLPMGVVRPLTEVEMDHYREPFLNPVDREPLWRFPNELPIAGEPANIVALVEEYMDWLHQSPVPKLLFWGTPGVLIPPAEAARLAKSLPNCKAVDIGPGLNLLQEDNPDLIGSEIARWLSTLEISG

SEQ ID NO: 1560 - protein, 277 aa, Synthetic construct
MFHYVDVGPRDGTPVLFLHGNPTSSYVWRNIIPHVAPTHRCIAPDLIGMGKSDKPDLGYFFDDQVRFMDAFIEALGLEEVVLVIHDWGSALGFHWAKRNPERVKGIAFMEFIRPIPTWDEWPEFARETFQAFRTTDVGRKLIIDQNVFIEGTLPMGVVRPLTEVEMDHYREPFLNPVDREPLWRFPNELPIAGEPANIVALVEEYMDWLHQSPVPKLLFWGTPGVLIPPAEAARLAKSLPNCKAVDIGPGLNLLQEDNPDLIGSEIARWLSTLEISG

SEQ ID NO: 1561 - protein, 277 aa, Synthetic construct
MFHYVDVGPRDGTPVLFLHGNPTSSYVWRNIIPHVAPTHRCIAPDLIGMGKSDKPDLGYFFDDNVRFMDAFIEALGLEEVVLVIHDWGSALGFHWAKRNPERVKGIAFMEFIRPIPTWDEWPEFARETFQAFRTTDVGRKLIIDQNVFIEGTLPMGVVRPLTEVEMDHYREPFLNPVDREPLWRFPNELPIAGEPANIVALVEEYMDWLHQSPVPKLLFWGTPGVLIPPAEAARLAKSLPNCKAVDIGPGLNLLQEDNPDLIGSEIARWLSTLEISG

SEQ ID NO: 1562 - protein, 277 aa, Synthetic construct
MFHYVDVGPRDGTPVLFLHGNPTSSYVWRNIIPHVAPTHRCIAPDLIGMGKSDKPDLGYFFDDYVRFMDAFIEALGLEEVVLVIHDWGSALGFHWAKRNPERVKGIAFMEFIRPIPTWDEWPEFARETFQAFRTTDVGRKLIIDQNVFIEGTLPMGVVRPLTEVEMDHYREPFLNPVDREPLWRFPNELPIAGEPANIVALVEEYMDWLHQSPVPKLLFWGTPGVLIPPAEAARLAKSLPNCKAVDIGPGLNLLQEDNPDLIGSEIARWLSTLEISG

SEQ ID NO: 1563 - protein, 277 aa, Synthetic construct
MFHYVDVGPRDGTPVLFLHGNPTSSYVWRNIIPHVAPTHRCIAPDLIGMGKSDKPDLGYFFDDRVRFMDAFIEALGLEEVVLVIHDWGSALGFHWAKRNPERVKGIAFMEFIRPIPTWDEWPEFARETFQAFRTTDVGRKLIIDQNVFIEGTLPMGVVRPLTEVEMDHYREPFLNPVDREPLWRFPNELPIAGEPANIVALVEEYMDWLHQSPVPKLLFWGTPGVLIPPAEAARLAKSLPNCKAVDIGPGLNLLQEDNPDLIGSEIARWLSTLEISG

SEQ ID NO: 1564 - protein, 277 aa, Synthetic construct
MFHYVDVGPRDGTPVLFLHGNPTSSYVWRNIIPHVAPTHRCIAPDLIGMGKSDKPDLGYFFDDAVRFMDAFIEALGLEEVVLVIHDWGSALGFHWAKRNPERVKGIAFMEFIRPIPTWDEWPEFARETFQAFRTTDVGRKLIIDQNVFIEGTLPMGVVRPLTEVEMDHYREPFLNPVDREPLWRFPNELPIAGEPANIVALVEEYMDWLHQSPVPKLLFWGTPGVLIPPAEAARLAKSLPNCKAVDIGPGLNLLQEDNPDLIGSEIARWLSTLEISG

SEQ ID NO: 1565 - protein, 277 aa, Synthetic construct
MFHYVDVGPRDGTPVLFLHGNPTSSYVWRNIIPHVAPTHRCIAPDLIGMGKSDKPDLGYFFDDSVRFMDAFIEALGLEEVVLVIHDWGSALGFHWAKRNPERVKGIAFMEFIRPIPTWDEWPEFARETFQAFRTTDVGRKLIIDQNVFIEGTLPMGVVRPLTEVEMDHYREPFLNPVDREPLWRFPNELPIAGEPANIVALVEEYMDWLHQSPVPKLLFWGTPGVLIPPAEAARLAKSLPNCKAVDIGPGLNLLQEDNPDLIGSEIARWLSTLEISG

SEQ ID NO: 1566 - protein, 277 aa, Synthetic construct
MFHYVDVGPRDGTPVLFLHGNPTSSYVWRNIIPHVAPTHRCIAPDLIGMGKSDKPDLGYFFDDHARFMDAFIEALGLEEVVLVIHDWGSALGFHWAKRNPERVKGIAFMEFIRPIPTWDEWPEFARETFQAFRTTDVGRKLIIDQNVFIEGTLPMGVVRPLTEVEMDHYREPFLNPVDREPLWRFPNELPIAGEPANIVALVEEYMDWLHQSPVPKLLFWGTPGVLIPPAEAARLAKSLPNCKAVDIGPGLNLLQEDNPDLIGSEIARWLSTLEISG

SEQ ID NO: 1567 - protein, 277 aa, Synthetic construct
MFHYVDVGPRDGTPVLFLHGNPTSSYVWRNIIPHVAPTHRCIAPDLIGMGKSDKPDLGYFFDDHSRFMDAFIEALGLEEVVLVIHDWGSALGFHWAKRNPERVKGIAFMEFIRPIPTWDEWPEFARETFQAFRTTDVGRKLIIDQNVFIEGTLPMGVVRPLTEVEMDHYREPFLNPVDREPLWRFPNELPIAGEPANIVALVEEYMDWLHQSPVPKLLFWGTPGVLIPPAEAARLAKSLPNCKAVDIGPGLNLLQEDNPDLIGSEIARWLSTLEISG

SEQ ID NO: 1568 - protein, 277 aa, Synthetic construct
MFHYVDVGPRDGTPVLFLHGNPTSSYVWRNIIPHVAPTHRCIAPDLIGMGKSDKPDLGYFFDDHIRFMDAFIEALGLEEVVLVIHDWGSALGFHWAKRNPERVKGIAFMEFIRPIPTWDEWPEFARETFQAFRTTDVGRKLIIDQNVFIEGTLPMGVVRPLTEVEMDHYREPFLNPVDREPLWRFPNELPIAGEPANIVALVEEYMDWLHQSPVPKLLFWGTPGVLIPPAEAARLAKSLPNCKAVDIGPGLNLLQEDNPDLIGSEIARWLSTLEISG

SEQ ID NO: 1569 - protein, 277 aa, Synthetic construct
MFHYVDVGPRDGTPVLFLHGNPTSSYVWRNIIPHVAPTHRCIAPDLIGMGKSDKPDLGYFFDDHTRFMDAFIEALGLEEVVLVIHDWGSALGFHWAKRNPERVKGIAFMEFIRPIPTWDEWPEFARETFQAFRTTDVGRKLIIDQNVFIEGTLPMGVVRPLTEVEMDHYREPFLNPVDREPLWRFPNELPIAGEPANIVALVEEYMDWLHQSPVPKLLFWGTPGVLIPPAEAARLAKSLPNCKAVDIGPGLNLLQEDNPDLIGSEIARWLSTLEISG

SEQ ID NO: 1570 - protein, 277 aa, Synthetic construct
MFHYVDVGPRDGTPVLFLHGNPTSSYVWRNIIPHVAPTHRCIAPDLIGMGKSDKPDLGYFFDDHRRFMDAFIEALGLEEVVLVIHDWGSALGFHWAKRNPERVKGIAFMEFIRPIPTWDEWPEFARETFQAFRTTDVGRKLIIDQNVFIEGTLPMGVVRPLTEVEMDHYREPFLNPVDREPLWRFPNELPIAGEPANIVALVEEYMDWLHQSPVPKLLFWGTPGVLIPPAEAARLAKSLPNCKAVDIGPGLNLLQEDNPDLIGSEIARWLSTLEISG

SEQ ID NO: 1571 - protein, 277 aa, Synthetic construct
MFHYVDVGPRDGTPVLFLHGNPTSSYVWRNIIPHVAPTHRCIAPDLIGMGKSDKPDLGYFFDDHGRFMDAFIEALGLEEVVLVIHDWGSALGFHWAKRNPERVKGIAFMEFIRPIPTWDEWPEFARETFQAFRTTDVGRKLIIDQNVFIEGTLPMGVVRPLTEVEMDHYREPFLNPVDREPLWRFPNELPIAGEPANIVALVEEYMDWLHQSPVPKLLFWGTPGVLIPPAEAARLAKSLPNCKAVDIGPGLNLLQEDNPDLIGSEIARWLSTLEISG

SEQ ID NO: 1572 - protein, 277 aa, Synthetic construct
MFHYVDVGPRDGTPVLFLHGNPTSSYVWRNIIPHVAPTHRCIAPDLIGMGKSDKPDLGYFFDDHVAFMDAFIEALGLEEVVLVIHDWGSALGFHWAKRNPERVKGIAFMEFIRPIPTWDEWPEFARETFQAFRTTDVGRKLIIDQNVFIEGTLPMGVVRPLTEVEMDHYREPFLNPVDREPLWRFPNELPIAGEPANIVALVEEYMDWLHQSPVPKLLFWGTPGVLIPPAEAARLAKSLPNCKAVDIGPGLNLLQEDNPDLIGSEIARWLSTLEISG

SEQ ID NO: 1573 - protein, 277 aa, Synthetic construct
MFHYVDVGPRDGTPVLFLHGNPTSSYVWRNIIPHVAPTHRCIAPDLIGMGKSDKPDLGYFFDDHVKFMDAFIEALGLEEVVLVIHDWGSALGFHWAKRNPERVKGIAFMEFIRPIPTWDEWPEFARETFQAFRTTDVGRKLIIDQNVFIEGTLPMGVVRPLTEVEMDHYREPFLNPVDREPLWRFPNELPIAGEPANIVALVEEYMDWLHQSPVPKLLFWGTPGVLIPPAEAARLAKSLPNCKAVDIGPGLNLLQEDNPDLIGSEIARWLSTLEISG

SEQ ID NO: 1574 - protein, 277 aa, Synthetic construct
MFHYVDVGPRDGTPVLFLHGNPTSSYVWRNIIPHVAPTHRCIAPDLIGMGKSDKPDLGYFFDDHVQFMDAFIEALGLEEVVLVIHDWGSALGFHWAKRNPERVKGIAFMEFIRPIPTWDEWPEFARETFQAFRTTDVGRKLIIDQNVFIEGTLPMGVVRPLTEVEMDHYREPFLNPVDREPLWRFPNELPIAGEPANIVALVEEYMDWLHQSPVPKLLFWGTPGVLIPPAEAARLAKSLPNCKAVDIGPGLNLLQEDNPDLIGSEIARWLSTLEISG

SEQ ID NO: 1575 - protein, 277 aa, Synthetic construct
MFHYVDVGPRDGTPVLFLHGNPTSSYVWRNIIPHVAPTHRCIAPDLIGMGKSDKPDLGYFFDDHVSFMDAFIEALGLEEVVLVIHDWGSALGFHWAKRNPERVKGIAFMEFIRPIPTWDEWPEFARETFQAFRTTDVGRKLIIDQNVFIEGTLPMGVVRPLTEVEMDHYREPFLNPVDREPLWRFPNELPIAGEPANIVALVEEYMDWLHQSPVPKLLFWGTPGVLIPPAEAARLAKSLPNCKAVDIGPGLNLLQEDNPDLIGSEIARWLSTLEISG

SEQ ID NO: 1576 - protein, 277 aa, Synthetic construct
MFHYVDVGPRDGTPVLFLHGNPTSSYVWRNIIPHVAPTHRCIAPDLIGMGKSDKPDLGYFFDDHVGFMDAFIEALGLEEVVLVIHDWGSALGFHWAKRNPERVKGIAFMEFIRPIPTWDEWPEFARETFQAFRTTDVGRKLIIDQNVFIEGTLPMGVVRPLTEVEMDHYREPFLNPVDREPLWRFPNELPIAGEPANIVALVEEYMDWLHQSPVPKLLFWGTPGVLIPPAEAARLAKSLPNCKAVDIGPGLNLLQEDNPDLIGSEIARWLSTLEISG

SEQ ID NO: 1577 - protein, 277 aa, Synthetic construct
MFHYVDVGPRDGTPVLFLHGNPTSSYVWRNIIPHVAPTHRCIAPDLIGMGKSDKPDLGYFFDDHVEFMDAFIEALGLEEVVLVIHDWGSALGFHWAKRNPERVKGIAFMEFIRPIPTWDEWPEFARETFQAFRTTDVGRKLIIDQNVFIEGTLPMGVVRPLTEVEMDHYREPFLNPVDREPLWRFPNELPIAGEPANIVALVEEYMDWLHQSPVPKLLFWGTPGVLIPPAEAARLAKSLPNCKAVDIGPGLNLLQEDNPDLIGSEIARWLSTLEISG

SEQ ID NO: 1578 - protein, 277 aa, Synthetic construct
MFHYVDVGPRDGTPVLFLHGNPTSSYVWRNIIPHVAPTHRCIAPDLIGMGKSDKPDLGYFFDDHVRYMDAFIEALGLEEVVLVIHDWGSALGFHWAKRNPERVKGIAFMEFIRPIPTWDEWPEFARETFQAFRTTDVGRKLIIDQNVFIEGTLPMGVVRPLTEVEMDHYREPFLNPVDREPLWRFPNELPIAGEPANIVALVEEYMDWLHQSPVPKLLFWGTPGVLIPPAEAARLAKSLPNCKAVDIGPGLNLLQEDNPDLIGSEIARWLSTLEISG

SEQ ID NO: 1579 - protein, 277 aa, Synthetic construct
MFHYVDVGPRDGTPVLFLHGNPTSSYVWRNIIPHVAPTHRCIAPDLIGMGKSDKPDLGYFFDDHVRHMDAFIEALGLEEVVLVIHDWGSALGFHWAKRNPERVKGIAFMEFIRPIPTWDEWPEFARETFQAFRTTDVGRKLIIDQNVFIEGTLPMGVVRPLTEVEMDHYREPFLNPVDREPLWRFPNELPIAGEPANIVALVEEYMDWLHQSPVPKLLFWGTPGVLIPPAEAARLAKSLPNCKAVDIGPGLNLLQEDNPDLIGSEIARWLSTLEISG

SEQ ID NO: 1580 - protein, 277 aa, Synthetic construct
MFHYVDVGPRDGTPVLFLHGNPTSSYVWRNIIPHVAPTHRCIAPDLIGMGKSDKPDLGYFFDDHVRWMDAFIEALGLEEVVLVIHDWGSALGFHWAKRNPERVKGIAFMEFIRPIPTWDEWPEFARETFQAFRTTDVGRKLIIDQNVFIEGTLPMGVVRPLTEVEMDHYREPFLNPVDREPLWRFPNELPIAGEPANIVALVEEYMDWLHQSPVPKLLFWGTPGVLIPPAEAARLAKSLPNCKAVDIGPGLNLLQEDNPDLIGSEIARWLSTLEISG

SEQ ID NO: 1581 - protein, 277 aa, Synthetic construct
MFHYVDVGPRDGTPVLFLHGNPTSSYVWRNIIPHVAPTHRCIAPDLIGMGKSDKPDLGYFFDDHVRNMDAFIEALGLEEVVLVIHDWGSALGFHWAKRNPERVKGIAFMEFIRPIPTWDEWPEFARETFQAFRTTDVGRKLIIDQNVFIEGTLPMGVVRPLTEVEMDHYREPFLNPVDREPLWRFPNELPIAGEPANIVALVEEYMDWLHQSPVPKLLFWGTPGVLIPPAEAARLAKSLPNCKAVDIGPGLNLLQEDNPDLIGSEIARWLSTLEISG

SEQ ID NO: 1582 - protein, 277 aa, Synthetic construct
MFHYVDVGPRDGTPVLFLHGNPTSSYVWRNIIPHVAPTHRCIAPDLIGMGKSDKPDLGYFFDDHVRAMDAFIEALGLEEVVLVIHDWGSALGFHWAKRNPERVKGIAFMEFIRPIPTWDEWPEFARETFQAFRTTDVGRKLIIDQNVFIEGTLPMGVVRPLTEVEMDHYREPFLNPVDREPLWRFPNELPIAGEPANIVALVEEYMDWLHQSPVPKLLFWGTPGVLIPPAEAARLAKSLPNCKAVDIGPGLNLLQEDNPDLIGSEIARWLSTLEISG

SEQ ID NO: 1583 - protein, 277 aa, Synthetic construct
MFHYVDVGPRDGTPVLFLHGNPTSSYVWRNIIPHVAPTHRCIAPDLIGMGKSDKPDLGYFFDDHVRCMDAFIEALGLEEVVLVIHDWGSALGFHWAKRNPERVKGIAFMEFIRPIPTWDEWPEFARETFQAFRTTDVGRKLIIDQNVFIEGTLPMGVVRPLTEVEMDHYREPFLNPVDREPLWRFPNELPIAGEPANIVALVEEYMDWLHQSPVPKLLFWGTPGVLIPPAEAARLAKSLPNCKAVDIGPGLNLLQEDNPDLIGSEIARWLSTLEISG

SEQ ID NO: 1584 - protein, 277 aa, Synthetic construct
MFHYVDVGPRDGTPVLFLHGNPTSSYVWRNIIPHVAPTHRCIAPDLIGMGKSDKPDLGYFFDDHVRFLDAFIEALGLEEVVLVIHDWGSALGFHWAKRNPERVKGIAFMEFIRPIPTWDEWPEFARETFQAFRTTDVGRKLIIDQNVFIEGTLPMGVVRPLTEVEMDHYREPFLNPVDREPLWRFPNELPIAGEPANIVALVEEYMDWLHQSPVPKLLFWGTPGVLIPPAEAARLAKSLPNCKAVDIGPGLNLLQEDNPDLIGSEIARWLSTLEISG

SEQ ID NO: 1585 - protein, 277 aa, Synthetic construct
MFHYVDVGPRDGTPVLFLHGNPTSSYVWRNIIPHVAPTHRCIAPDLIGMGKSDKPDLGYFFDDHVRFIDAFIEALGLEEVVLVIHDWGSALGFHWAKRNPERVKGIAFMEFIRPIPTWDEWPEFARETFQAFRTTDVGRKLIIDQNVFIEGTLPMGVVRPLTEVEMDHYREPFLNPVDREPLWRFPNELPIAGEPANIVALVEEYMDWLHQSPVPKLLFWGTPGVLIPPAEAARLAKSLPNCKAVDIGPGLNLLQEDNPDLIGSEIARWLSTLEISG

SEQ ID NO: 1586 - protein, 277 aa, Synthetic construct
MFHYVDVGPRDGTPVLFLHGNPTSSYVWRNIIPHVAPTHRCIAPDLIGMGKSDKPDLGYFFDDHVRFVDAFIEALGLEEVVLVIHDWGSALGFHWAKRNPERVKGIAFMEFIRPIPTWDEWPEFARETFQAFRTTDVGRKLIIDQNVFIEGTLPMGVVRPLTEVEMDHYREPFLNPVDREPLWRFPNELPIAGEPANIVALVEEYMDWLHQSPVPKLLFWGTPGVLIPPAEAARLAKSLPNCKAVDIGPGLNLLQEDNPDLIGSEIARWLSTLEISG

SEQ ID NO: 1587 - protein, 277 aa, Synthetic construct
MFHYVDVGPRDGTPVLFLHGNPTSSYVWRNIIPHVAPTHRCIAPDLIGMGKSDKPDLGYFFDDHVRFFDAFIEALGLEEVVLVIHDWGSALGFHWAKRNPERVKGIAFMEFIRPIPTWDEWPEFARETFQAFRTTDVGRKLIIDQNVFIEGTLPMGVVRPLTEVEMDHYREPFLNPVDREPLWRFPNELPIAGEPANIVALVEEYMDWLHQSPVPKLLFWGTPGVLIPPAEAARLAKSLPNCKAVDIGPGLNLLQEDNPDLIGSEIARWLSTLEISG

SEQ ID NO: 1588 - protein, 277 aa, Synthetic construct
MFHYVDVGPRDGTPVLFLHGNPTSSYVWRNIIPHVAPTHRCIAPDLIGMGKSDKPDLGYFFDDHVRFTDAFIEALGLEEVVLVIHDWGSALGFHWAKRNPERVKGIAFMEFIRPIPTWDEWPEFARETFQAFRTTDVGRKLIIDQNVFIEGTLPMGVVRPLTEVEMDHYREPFLNPVDREPLWRFPNELPIAGEPANIVALVEEYMDWLHQSPVPKLLFWGTPGVLIPPAEAARLAKSLPNCKAVDIGPGLNLLQEDNPDLIGSEIARWLSTLEISG

SEQ ID NO: 1589 - protein, 277 aa, Synthetic construct
MFHYVDVGPRDGTPVLFLHGNPTSSYVWRNIIPHVAPTHRCIAPDLIGMGKSDKPDLGYFFDDHVRFADAFIEALGLEEVVLVIHDWGSALGFHWAKRNPERVKGIAFMEFIRPIPTWDEWPEFARETFQAFRTTDVGRKLIIDQNVFIEGTLPMGVVRPLTEVEMDHYREPFLNPVDREPLWRFPNELPIAGEPANIVALVEEYMDWLHQSPVPKLLFWGTPGVLIPPAEAARLAKSLPNCKAVDIGPGLNLLQEDNPDLIGSEIARWLSTLEISG

SEQ ID NO: 1590 - protein, 277 aa, Synthetic construct
MFHYVDVGPRDGTPVLFLHGNPTSSYVWRNIIPHVAPTHRCIAPDLIGMGKSDKPDLGYFFDDHVRFMEAFIEALGLEEVVLVIHDWGSALGFHWAKRNPERVKGIAFMEFIRPIPTWDEWPEFARETFQAFRTTDVGRKLIIDQNVFIEGTLPMGVVRPLTEVEMDHYREPFLNPVDREPLWRFPNELPIAGEPANIVALVEEYMDWLHQSPVPKLLFWGTPGVLIPPAEAARLAKSLPNCKAVDIGPGLNLLQEDNPDLIGSEIARWLSTLEISG

SEQ ID NO: 1591 - protein, 277 aa, Synthetic construct
MFHYVDVGPRDGTPVLFLHGNPTSSYVWRNIIPHVAPTHRCIAPDLIGMGKSDKPDLGYFFDDHVRFMNAFIEALGLEEVVLVIHDWGSALGFHWAKRNPERVKGIAFMEFIRPIPTWDEWPEFARETFQAFRTTDVGRKLIIDQNVFIEGTLPMGVVRPLTEVEMDHYREPFLNPVDREPLWRFPNELPIAGEPANIVALVEEYMDWLHQSPVPKLLFWGTPGVLIPPAEAARLAKSLPNCKAVDIGPGLNLLQEDNPDLIGSEIARWLSTLEISG

SEQ ID NO: 1592 - protein, 277 aa, Synthetic construct
MFHYVDVGPRDGTPVLFLHGNPTSSYVWRNIIPHVAPTHRCIAPDLIGMGKSDKPDLGYFFDDHVRFMGAFIEALGLEEVVLVIHDWGSALGFHWAKRNPERVKGIAFMEFIRPIPTWDEWPEFARETFQAFRTTDVGRKLIIDQNVFIEGTLPMGVVRPLTEVEMDHYREPFLNPVDREPLWRFPNELPIAGEPANIVALVEEYMDWLHQSPVPKLLFWGTPGVLIPPAEAARLAKSLPNCKAVDIGPGLNLLQEDNPDLIGSEIARWLSTLEISG

SEQ ID NO: 1593 - protein, 277 aa, Synthetic construct
MFHYVDVGPRDGTPVLFLHGNPTSSYVWRNIIPHVAPTHRCIAPDLIGMGKSDKPDLGYFFDDHVRFMTAFIEALGLEEVVLVIHDWGSALGFHWAKRNPERVKGIAFMEFIRPIPTWDEWPEFARETFQAFRTTDVGRKLIIDQNVFIEGTLPMGVVRPLTEVEMDHYREPFLNPVDREPLWRFPNELPIAGEPANIVALVEEYMDWLHQSPVPKLLFWGTPGVLIPPAEAARLAKSLPNCKAVDIGPGLNLLQEDNPDLIGSEIARWLSTLEISG

SEQ ID NO: 1594 - protein, 277 aa, Synthetic construct
MFHYVDVGPRDGTPVLFLHGNPTSSYVWRNIIPHVAPTHRCIAPDLIGMGKSDKPDLGYFFDDHVRFMSAFIEALGLEEVVLVIHDWGSALGFHWAKRNPERVKGIAFMEFIRPIPTWDEWPEFARETFQAFRTTDVGRKLIIDQNVFIEGTLPMGVVRPLTEVEMDHYREPFLNPVDREPLWRFPNELPIAGEPANIVALVEEYMDWLHQSPVPKLLFWGTPGVLIPPAEAARLAKSLPNCKAVDIGPGLNLLQEDNPDLIGSEIARWLSTLEISG

SEQ ID NO: 1595 - protein, 277 aa, Synthetic construct
MFHYVDVGPRDGTPVLFLHGNPTSSYVWRNIIPHVAPTHRCIAPDLIGMGKSDKPDLGYFFDDHVRFMAAFIEALGLEEVVLVIHDWGSALGFHWAKRNPERVKGIAFMEFIRPIPTWDEWPEFARETFQAFRTTDVGRKLIIDQNVFIEGTLPMGVVRPLTEVEMDHYREPFLNPVDREPLWRFPNELPIAGEPANIVALVEEYMDWLHQSPVPKLLFWGTPGVLIPPAEAARLAKSLPNCKAVDIGPGLNLLQEDNPDLIGSEIARWLSTLEISG

SEQ ID NO: 1596 - protein, 277 aa, Synthetic construct
MFHYVDVGPRDGTPVLFLHGNPTSSYVWRNIIPHVAPTHRCIAPDLIGMGKSDKPDLGYFFDDHVRFMDGFIEALGLEEVVLVIHDWGSALGFHWAKRNPERVKGIAFMEFIRPIPTWDEWPEFARETFQAFRTTDVGRKLIIDQNVFIEGTLPMGVVRPLTEVEMDHYREPFLNPVDREPLWRFPNELPIAGEPANIVALVEEYMDWLHQSPVPKLLFWGTPGVLIPPAEAARLAKSLPNCKAVDIGPGLNLLQEDNPDLIGSEIARWLSTLEISG

SEQ ID NO: 1597 - protein, 277 aa, Synthetic construct
MFHYVDVGPRDGTPVLFLHGNPTSSYVWRNIIPHVAPTHRCIAPDLIGMGKSDKPDLGYFFDDHVRFMDEFIEALGLEEVVLVIHDWGSALGFHWAKRNPERVKGIAFMEFIRPIPTWDEWPEFARETFQAFRTTDVGRKLIIDQNVFIEGTLPMGVVRPLTEVEMDHYREPFLNPVDREPLWRFPNELPIAGEPANIVALVEEYMDWLHQSPVPKLLFWGTPGVLIPPAEAARLAKSLPNCKAVDIGPGLNLLQEDNPDLIGSEIARWLSTLEISG

SEQ ID NO: 1598 - protein, 277 aa, Synthetic construct
MFHYVDVGPRDGTPVLFLHGNPTSSYVWRNIIPHVAPTHRCIAPDLIGMGKSDKPDLGYFFDDHVRFMDSFIEALGLEEVVLVIHDWGSALGFHWAKRNPERVKGIAFMEFIRPIPTWDEWPEFARETFQAFRTTDVGRKLIIDQNVFIEGTLPMGVVRPLTEVEMDHYREPFLNPVDREPLWRFPNELPIAGEPANIVALVEEYMDWLHQSPVPKLLFWGTPGVLIPPAEAARLAKSLPNCKAVDIGPGLNLLQEDNPDLIGSEIARWLSTLEISG

SEQ ID NO: 1599 - protein, 277 aa, Synthetic construct
MFHYVDVGPRDGTPVLFLHGNPTSSYVWRNIIPHVAPTHRCIAPDLIGMGKSDKPDLGYFFDDHVRFMDRFIEALGLEEVVLVIHDWGSALGFHWAKRNPERVKGIAFMEFIRPIPTWDEWPEFARETFQAFRTTDVGRKLIIDQNVFIEGTLPMGVVRPLTEVEMDHYREPFLNPVDREPLWRFPNELPIAGEPANIVALVEEYMDWLHQSPVPKLLFWGTPGVLIPPAEAARLAKSLPNCKAVDIGPGLNLLQEDNPDLIGSEIARWLSTLEISG

SEQ ID NO: 1600 - protein, 277 aa, Synthetic construct
MFHYVDVGPRDGTPVLFLHGNPTSSYVWRNIIPHVAPTHRCIAPDLIGMGKSDKPDLGYFFDDHVRFMDDFIEALGLEEVVLVIHDWGSALGFHWAKRNPERVKGIAFMEFIRPIPTWDEWPEFARETFQAFRTTDVGRKLIIDQNVFIEGTLPMGVVRPLTEVEMDHYREPFLNPVDREPLWRFPNELPIAGEPANIVALVEEYMDWLHQSPVPKLLFWGTPGVLIPPAEAARLAKSLPNCKAVDIGPGLNLLQEDNPDLIGSEIARWLSTLEISG

SEQ ID NO: 1601 - protein, 277 aa, Synthetic construct
MFHYVDVGPRDGTPVLFLHGNPTSSYVWRNIIPHVAPTHRCIAPDLIGMGKSDKPDLGYFFDDHVRFMDQFIEALGLEEVVLVIHDWGSALGFHWAKRNPERVKGIAFMEFIRPIPTWDEWPEFARETFQAFRTTDVGRKLIIDQNVFIEGTLPMGVVRPLTEVEMDHYREPFLNPVDREPLWRFPNELPIAGEPANIVALVEEYMDWLHQSPVPKLLFWGTPGVLIPPAEAARLAKSLPNCKAVDIGPGLNLLQEDNPDLIGSEIARWLSTLEISG

SEQ ID NO: 1602 - protein, 277 aa, Synthetic construct
MFHYVDVGPRDGTPVLFLHGNPTSSYVWRNIIPHVAPTHRCIAPDLIGMGKSDKPDLGYFFDDHVRFMDAWIEALGLEEVVLVIHDWGSALGFHWAKRNPERVKGIAFMEFIRPIPTWDEWPEFARETFQAFRTTDVGRKLIIDQNVFIEGTLPMGVVRPLTEVEMDHYREPFLNPVDREPLWRFPNELPIAGEPANIVALVEEYMDWLHQSPVPKLLFWGTPGVLIPPAEAARLAKSLPNCKAVDIGPGLNLLQEDNPDLIGSEIARWLSTLEISG

SEQ ID NO: 1603 - protein, 277 aa, Synthetic construct
MFHYVDVGPRDGTPVLFLHGNPTSSYVWRNIIPHVAPTHRCIAPDLIGMGKSDKPDLGYFFDDHVRFMDALIEALGLEEVVLVIHDWGSALGFHWAKRNPERVKGIAFMEFIRPIPTWDEWPEFARETFQAFRTTDVGRKLIIDQNVFIEGTLPMGVVRPLTEVEMDHYREPFLNPVDREPLWRFPNELPIAGEPANIVALVEEYMDWLHQSPVPKLLFWGTPGVLIPPAEAARLAKSLPNCKAVDIGPGLNLLQEDNPDLIGSEIARWLSTLEISG

SEQ ID NO: 1604 - protein, 277 aa, Synthetic construct
MFHYVDVGPRDGTPVLFLHGNPTSSYVWRNIIPHVAPTHRCIAPDLIGMGKSDKPDLGYFFDDHVRFMDAVIEALGLEEVVLVIHDWGSALGFHWAKRNPERVKGIAFMEFIRPIPTWDEWPEFARETFQAFRTTDVGRKLIIDQNVFIEGTLPMGVVRPLTEVEMDHYREPFLNPVDREPLWRFPNELPIAGEPANIVALVEEYMDWLHQSPVPKLLFWGTPGVLIPPAEAARLAKSLPNCKAVDIGPGLNLLQEDNPDLIGSEIARWLSTLEISG

SEQ ID NO: 1605 - protein, 277 aa, Synthetic construct
MFHYVDVGPRDGTPVLFLHGNPTSSYVWRNIIPHVAPTHRCIAPDLIGMGKSDKPDLGYFFDDHVRFMDAMIEALGLEEVVLVIHDWGSALGFHWAKRNPERVKGIAFMEFIRPIPTWDEWPEFARETFQAFRTTDVGRKLIIDQNVFIEGTLPMGVVRPLTEVEMDHYREPFLNPVDREPLWRFPNELPIAGEPANIVALVEEYMDWLHQSPVPKLLFWGTPGVLIPPAEAARLAKSLPNCKAVDIGPGLNLLQEDNPDLIGSEIARWLSTLEISG

SEQ ID NO: 1606 - protein, 277 aa, Synthetic construct
MFHYVDVGPRDGTPVLFLHGNPTSSYVWRNIIPHVAPTHRCIAPDLIGMGKSDKPDLGYFFDDHVRFMDAAIEALGLEEVVLVIHDWGSALGFHWAKRNPERVKGIAFMEFIRPIPTWDEWPEFARETFQAFRTTDVGRKLIIDQNVFIEGTLPMGVVRPLTEVEMDHYREPFLNPVDREPLWRFPNELPIAGEPANIVALVEEYMDWLHQSPVPKLLFWGTPGVLIPPAEAARLAKSLPNCKAVDIGPGLNLLQEDNPDLIGSEIARWLSTLEISG

SEQ ID NO: 1607 - protein, 277 aa, Synthetic construct
MFHYVDVGPRDGTPVLFLHGNPTSSYVWRNIIPHVAPTHRCIAPDLIGMGKSDKPDLGYFFDDHVRFMDAYIEALGLEEVVLVIHDWGSALGFHWAKRNPERVKGIAFMEFIRPIPTWDEWPEFARETFQAFRTTDVGRKLIIDQNVFIEGTLPMGVVRPLTEVEMDHYREPFLNPVDREPLWRFPNELPIAGEPANIVALVEEYMDWLHQSPVPKLLFWGTPGVLIPPAEAARLAKSLPNCKAVDIGPGLNLLQEDNPDLIGSEIARWLSTLEISG

SEQ ID NO: 1608 - protein, 277 aa, Synthetic construct
MFHYVDVGPRDGTPVLFLHGNPTSSYVWRNIIPHVAPTHRCIAPDLIGMGKSDKPDLGYFFDDHVRFMDAFVEALGLEEVVLVIHDWGSALGFHWAKRNPERVKGIAFMEFIRPIPTWDEWPEFARETFQAFRTTDVGRKLIIDQNVFIEGTLPMGVVRPLTEVEMDHYREPFLNPVDREPLWRFPNELPIAGEPANIVALVEEYMDWLHQSPVPKLLFWGTPGVLIPPAEAARLAKSLPNCKAVDIGPGLNLLQEDNPDLIGSEIARWLSTLEISG

SEQ ID NO: 1609 - protein, 277 aa, Synthetic construct
MFHYVDVGPRDGTPVLFLHGNPTSSYVWRNIIPHVAPTHRCIAPDLIGMGKSDKPDLGYFFDDHVRFMDAFFEALGLEEVVLVIHDWGSALGFHWAKRNPERVKGIAFMEFIRPIPTWDEWPEFARETFQAFRTTDVGRKLIIDQNVFIEGTLPMGVVRPLTEVEMDHYREPFLNPVDREPLWRFPNELPIAGEPANIVALVEEYMDWLHQSPVPKLLFWGTPGVLIPPAEAARLAKSLPNCKAVDIGPGLNLLQEDNPDLIGSEIARWLSTLEISG

SEQ ID NO: 1610 - protein, 277 aa, Synthetic construct
MFHYVDVGPRDGTPVLFLHGNPTSSYVWRNIIPHVAPTHRCIAPDLIGMGKSDKPDLGYFFDDHVRFMDAFLEALGLEEVVLVIHDWGSALGFHWAKRNPERVKGIAFMEFIRPIPTWDEWPEFARETFQAFRTTDVGRKLIIDQNVFIEGTLPMGVVRPLTEVEMDHYREPFLNPVDREPLWRFPNELPIAGEPANIVALVEEYMDWLHQSPVPKLLFWGTPGVLIPPAEAARLAKSLPNCKAVDIGPGLNLLQEDNPDLIGSEIARWLSTLEISG

SEQ ID NO: 1611 - protein, 277 aa, Synthetic construct
MFHYVDVGPRDGTPVLFLHGNPTSSYVWRNIIPHVAPTHRCIAPDLIGMGKSDKPDLGYFFDDHVRFMDAFTEALGLEEVVLVIHDWGSALGFHWAKRNPERVKGIAFMEFIRPIPTWDEWPEFARETFQAFRTTDVGRKLIIDQNVFIEGTLPMGVVRPLTEVEMDHYREPFLNPVDREPLWRFPNELPIAGEPANIVALVEEYMDWLHQSPVPKLLFWGTPGVLIPPAEAARLAKSLPNCKAVDIGPGLNLLQEDNPDLIGSEIARWLSTLEISG

SEQ ID NO: 1612 - protein, 277 aa, Synthetic construct
MFHYVDVGPRDGTPVLFLHGNPTSSYVWRNIIPHVAPTHRCIAPDLIGMGKSDKPDLGYFFDDHVRFMDAFAEALGLEEVVLVIHDWGSALGFHWAKRNPERVKGIAFMEFIRPIPTWDEWPEFARETFQAFRTTDVGRKLIIDQNVFIEGTLPMGVVRPLTEVEMDHYREPFLNPVDREPLWRFPNELPIAGEPANIVALVEEYMDWLHQSPVPKLLFWGTPGVLIPPAEAARLAKSLPNCKAVDIGPGLNLLQEDNPDLIGSEIARWLSTLEISG

SEQ ID NO: 1613 - protein, 277 aa, Synthetic construct
MFHYVDVGPRDGTPVLFLHGNPTSSYVWRNIIPHVAPTHRCIAPDLIGMGKSDKPDLGYFFDDHVRFMDAFMEALGLEEVVLVIHDWGSALGFHWAKRNPERVKGIAFMEFIRPIPTWDEWPEFARETFQAFRTTDVGRKLIIDQNVFIEGTLPMGVVRPLTEVEMDHYREPFLNPVDREPLWRFPNELPIAGEPANIVALVEEYMDWLHQSPVPKLLFWGTPGVLIPPAEAARLAKSLPNCKAVDIGPGLNLLQEDNPDLIGSEIARWLSTLEISG

SEQ ID NO: 1614 - protein, 277 aa, Synthetic construct
MFHYVDVGPRDGTPVLFLHGNPTSSYVWRNIIPHVAPTHRCIAPDLIGMGKSDKPDLGYFFDDHVRFMDAFIDALGLEEVVLVIHDWGSALGFHWAKRNPERVKGIAFMEFIRPIPTWDEWPEFARETFQAFRTTDVGRKLIIDQNVFIEGTLPMGVVRPLTEVEMDHYREPFLNPVDREPLWRFPNELPIAGEPANIVALVEEYMDWLHQSPVPKLLFWGTPGVLIPPAEAARLAKSLPNCKAVDIGPGLNLLQEDNPDLIGSEIARWLSTLEISG

SEQ ID NO: 1615 - protein, 277 aa, Synthetic construct
MFHYVDVGPRDGTPVLFLHGNPTSSYVWRNIIPHVAPTHRCIAPDLIGMGKSDKPDLGYFFDDHVRFMDAFIAALGLEEVVLVIHDWGSALGFHWAKRNPERVKGIAFMEFIRPIPTWDEWPEFARETFQAFRTTDVGRKLIIDQNVFIEGTLPMGVVRPLTEVEMDHYREPFLNPVDREPLWRFPNELPIAGEPANIVALVEEYMDWLHQSPVPKLLFWGTPGVLIPPAEAARLAKSLPNCKAVDIGPGLNLLQEDNPDLIGSEIARWLSTLEISG

SEQ ID NO: 1616 - protein, 277 aa, Synthetic construct
MFHYVDVGPRDGTPVLFLHGNPTSSYVWRNIIPHVAPTHRCIAPDLIGMGKSDKPDLGYFFDDHVRFMDAFITALGLEEVVLVIHDWGSALGFHWAKRNPERVKGIAFMEFIRPIPTWDEWPEFARETFQAFRTTDVGRKLIIDQNVFIEGTLPMGVVRPLTEVEMDHYREPFLNPVDREPLWRFPNELPIAGEPANIVALVEEYMDWLHQSPVPKLLFWGTPGVLIPPAEAARLAKSLPNCKAVDIGPGLNLLQEDNPDLIGSEIARWLSTLEISG

SEQ ID NO: 1617 - protein, 277 aa, Synthetic construct
MFHYVDVGPRDGTPVLFLHGNPTSSYVWRNIIPHVAPTHRCIAPDLIGMGKSDKPDLGYFFDDHVRFMDAFISALGLEEVVLVIHDWGSALGFHWAKRNPERVKGIAFMEFIRPIPTWDEWPEFARETFQAFRTTDVGRKLIIDQNVFIEGTLPMGVVRPLTEVEMDHYREPFLNPVDREPLWRFPNELPIAGEPANIVALVEEYMDWLHQSPVPKLLFWGTPGVLIPPAEAARLAKSLPNCKAVDIGPGLNLLQEDNPDLIGSEIARWLSTLEISG

SEQ ID NO: 1618 - protein, 277 aa, Synthetic construct
MFHYVDVGPRDGTPVLFLHGNPTSSYVWRNIIPHVAPTHRCIAPDLIGMGKSDKPDLGYFFDDHVRFMDAFIQALGLEEVVLVIHDWGSALGFHWAKRNPERVKGIAFMEFIRPIPTWDEWPEFARETFQAFRTTDVGRKLIIDQNVFIEGTLPMGVVRPLTEVEMDHYREPFLNPVDREPLWRFPNELPIAGEPANIVALVEEYMDWLHQSPVPKLLFWGTPGVLIPPAEAARLAKSLPNCKAVDIGPGLNLLQEDNPDLIGSEIARWLSTLEISG

SEQ ID NO: 1619 - protein, 277 aa, Synthetic construct
MFHYVDVGPRDGTPVLFLHGNPTSSYVWRNIIPHVAPTHRCIAPDLIGMGKSDKPDLGYFFDDHVRFMDAFIGALGLEEVVLVIHDWGSALGFHWAKRNPERVKGIAFMEFIRPIPTWDEWPEFARETFQAFRTTDVGRKLIIDQNVFIEGTLPMGVVRPLTEVEMDHYREPFLNPVDREPLWRFPNELPIAGEPANIVALVEEYMDWLHQSPVPKLLFWGTPGVLIPPAEAARLAKSLPNCKAVDIGPGLNLLQEDNPDLIGSEIARWLSTLEISG

SEQ ID NO: 1620 - protein, 277 aa, Synthetic construct
MFHYVDVGPRDGTPVLFLHGNPTSSYVWRNIIPHVAPTHRCIAPDLIGMGKSDKPDLGYFFDDHVRFMDAFIEELGLEEVVLVIHDWGSALGFHWAKRNPERVKGIAFMEFIRPIPTWDEWPEFARETFQAFRTTDVGRKLIIDQNVFIEGTLPMGVVRPLTEVEMDHYREPFLNPVDREPLWRFPNELPIAGEPANIVALVEEYMDWLHQSPVPKLLFWGTPGVLIPPAEAARLAKSLPNCKAVDIGPGLNLLQEDNPDLIGSEIARWLSTLEISG

SEQ ID NO: 1621 - protein, 277 aa, Synthetic construct
MFHYVDVGPRDGTPVLFLHGNPTSSYVWRNIIPHVAPTHRCIAPDLIGMGKSDKPDLGYFFDDHVRFMDAFIEKLGLEEVVLVIHDWGSALGFHWAKRNPERVKGIAFMEFIRPIPTWDEWPEFARETFQAFRTTDVGRKLIIDQNVFIEGTLPMGVVRPLTEVEMDHYREPFLNPVDREPLWRFPNELPIAGEPANIVALVEEYMDWLHQSPVPKLLFWGTPGVLIPPAEAARLAKSLPNCKAVDIGPGLNLLQEDNPDLIGSEIARWLSTLEISG

SEQ ID NO: 1622 - protein, 277 aa, Synthetic construct
MFHYVDVGPRDGTPVLFLHGNPTSSYVWRNIIPHVAPTHRCIAPDLIGMGKSDKPDLGYFFDDHVRFMDAFIEQLGLEEVVLVIHDWGSALGFHWAKRNPERVKGIAFMEFIRPIPTWDEWPEFARETFQAFRTTDVGRKLIIDQNVFIEGTLPMGVVRPLTEVEMDHYREPFLNPVDREPLWRFPNELPIAGEPANIVALVEEYMDWLHQSPVPKLLFWGTPGVLIPPAEAARLAKSLPNCKAVDIGPGLNLLQEDNPDLIGSEIARWLSTLEISG

SEQ ID NO: 1623 - protein, 277 aa, Synthetic construct
MFHYVDVGPRDGTPVLFLHGNPTSSYVWRNIIPHVAPTHRCIAPDLIGMGKSDKPDLGYFFDDHVRFMDAFIERLGLEEVVLVIHDWGSALGFHWAKRNPERVKGIAFMEFIRPIPTWDEWPEFARETFQAFRTTDVGRKLIIDQNVFIEGTLPMGVVRPLTEVEMDHYREPFLNPVDREPLWRFPNELPIAGEPANIVALVEEYMDWLHQSPVPKLLFWGTPGVLIPPAEAARLAKSLPNCKAVDIGPGLNLLQEDNPDLIGSEIARWLSTLEISG

SEQ ID NO: 1624 - protein, 277 aa, Synthetic construct
MFHYVDVGPRDGTPVLFLHGNPTSSYVWRNIIPHVAPTHRCIAPDLIGMGKSDKPDLGYFFDDHVRFMDAFIETLGLEEVVLVIHDWGSALGFHWAKRNPERVKGIAFMEFIRPIPTWDEWPEFARETFQAFRTTDVGRKLIIDQNVFIEGTLPMGVVRPLTEVEMDHYREPFLNPVDREPLWRFPNELPIAGEPANIVALVEEYMDWLHQSPVPKLLFWGTPGVLIPPAEAARLAKSLPNCKAVDIGPGLNLLQEDNPDLIGSEIARWLSTLEISG

SEQ ID NO: 1625 - protein, 277 aa, Synthetic construct
MFHYVDVGPRDGTPVLFLHGNPTSSYVWRNIIPHVAPTHRCIAPDLIGMGKSDKPDLGYFFDDHVRFMDAFIEHLGLEEVVLVIHDWGSALGFHWAKRNPERVKGIAFMEFIRPIPTWDEWPEFARETFQAFRTTDVGRKLIIDQNVFIEGTLPMGVVRPLTEVEMDHYREPFLNPVDREPLWRFPNELPIAGEPANIVALVEEYMDWLHQSPVPKLLFWGTPGVLIPPAEAARLAKSLPNCKAVDIGPGLNLLQEDNPDLIGSEIARWLSTLEISG

SEQ ID NO: 1626 - protein, 277 aa, Synthetic construct
MFHYVDVGPRDGTPVLFLHGNPTSSYVWRNIIPHVAPTHRCIAPDLIGMGKSDKPDLGYFFDDHVRFMDAFIEAIGLEEVVLVIHDWGSALGFHWAKRNPERVKGIAFMEFIRPIPTWDEWPEFARETFQAFRTTDVGRKLIIDQNVFIEGTLPMGVVRPLTEVEMDHYREPFLNPVDREPLWRFPNELPIAGEPANIVALVEEYMDWLHQSPVPKLLFWGTPGVLIPPAEAARLAKSLPNCKAVDIGPGLNLLQEDNPDLIGSEIARWLSTLEISG

SEQ ID NO: 1627 - protein, 277 aa, Synthetic construct
MFHYVDVGPRDGTPVLFLHGNPTSSYVWRNIIPHVAPTHRCIAPDLIGMGKSDKPDLGYFFDDHVRFMDAFIEAMGLEEVVLVIHDWGSALGFHWAKRNPERVKGIAFMEFIRPIPTWDEWPEFARETFQAFRTTDVGRKLIIDQNVFIEGTLPMGVVRPLTEVEMDHYREPFLNPVDREPLWRFPNELPIAGEPANIVALVEEYMDWLHQSPVPKLLFWGTPGVLIPPAEAARLAKSLPNCKAVDIGPGLNLLQEDNPDLIGSEIARWLSTLEISG

SEQ ID NO: 1628 - protein, 277 aa, Synthetic construct
MFHYVDVGPRDGTPVLFLHGNPTSSYVWRNIIPHVAPTHRCIAPDLIGMGKSDKPDLGYFFDDHVRFMDAFIEAVGLEEVVLVIHDWGSALGFHWAKRNPERVKGIAFMEFIRPIPTWDEWPEFARETFQAFRTTDVGRKLIIDQNVFIEGTLPMGVVRPLTEVEMDHYREPFLNPVDREPLWRFPNELPIAGEPANIVALVEEYMDWLHQSPVPKLLFWGTPGVLIPPAEAARLAKSLPNCKAVDIGPGLNLLQEDNPDLIGSEIARWLSTLEISG

SEQ ID NO: 1629 - protein, 277 aa, Synthetic construct
MFHYVDVGPRDGTPVLFLHGNPTSSYVWRNIIPHVAPTHRCIAPDLIGMGKSDKPDLGYFFDDHVRFMDAFIEAAGLEEVVLVIHDWGSALGFHWAKRNPERVKGIAFMEFIRPIPTWDEWPEFARETFQAFRTTDVGRKLIIDQNVFIEGTLPMGVVRPLTEVEMDHYREPFLNPVDREPLWRFPNELPIAGEPANIVALVEEYMDWLHQSPVPKLLFWGTPGVLIPPAEAARLAKSLPNCKAVDIGPGLNLLQEDNPDLIGSEIARWLSTLEISG

SEQ ID NO: 1630 - protein, 277 aa, Synthetic construct
MFHYVDVGPRDGTPVLFLHGNPTSSYVWRNIIPHVAPTHRCIAPDLIGMGKSDKPDLGYFFDDHVRFMDAFIEAQGLEEVVLVIHDWGSALGFHWAKRNPERVKGIAFMEFIRPIPTWDEWPEFARETFQAFRTTDVGRKLIIDQNVFIEGTLPMGVVRPLTEVEMDHYREPFLNPVDREPLWRFPNELPIAGEPANIVALVEEYMDWLHQSPVPKLLFWGTPGVLIPPAEAARLAKSLPNCKAVDIGPGLNLLQEDNPDLIGSEIARWLSTLEISG

SEQ ID NO: 1631 - protein, 277 aa, Synthetic construct
MFHYVDVGPRDGTPVLFLHGNPTSSYVWRNIIPHVAPTHRCIAPDLIGMGKSDKPDLGYFFDDHVRFMDAFIEATGLEEVVLVIHDWGSALGFHWAKRNPERVKGIAFMEFIRPIPTWDEWPEFARETFQAFRTTDVGRKLIIDQNVFIEGTLPMGVVRPLTEVEMDHYREPFLNPVDREPLWRFPNELPIAGEPANIVALVEEYMDWLHQSPVPKLLFWGTPGVLIPPAEAARLAKSLPNCKAVDIGPGLNLLQEDNPDLIGSEIARWLSTLEISG

SEQ ID NO: 1632 - protein, 277 aa, Synthetic construct
MFHYVDVGPRDGTPVLFLHGNPTSSYVWRNIIPHVAPTHRCIAPDLIGMGKSDKPDLGYFFDDHVRFMDAFIEALDLEEVVLVIHDWGSALGFHWAKRNPERVKGIAFMEFIRPIPTWDEWPEFARETFQAFRTTDVGRKLIIDQNVFIEGTLPMGVVRPLTEVEMDHYREPFLNPVDREPLWRFPNELPIAGEPANIVALVEEYMDWLHQSPVPKLLFWGTPGVLIPPAEAARLAKSLPNCKAVDIGPGLNLLQEDNPDLIGSEIARWLSTLEISG

SEQ ID NO: 1633 - protein, 277 aa, Synthetic construct
MFHYVDVGPRDGTPVLFLHGNPTSSYVWRNIIPHVAPTHRCIAPDLIGMGKSDKPDLGYFFDDHVRFMDAFIEALELEEVVLVIHDWGSALGFHWAKRNPERVKGIAFMEFIRPIPTWDEWPEFARETFQAFRTTDVGRKLIIDQNVFIEGTLPMGVVRPLTEVEMDHYREPFLNPVDREPLWRFPNELPIAGEPANIVALVEEYMDWLHQSPVPKLLFWGTPGVLIPPAEAARLAKSLPNCKAVDIGPGLNLLQEDNPDLIGSEIARWLSTLEISG

SEQ ID NO: 1634 - protein, 277 aa, Synthetic construct
MFHYVDVGPRDGTPVLFLHGNPTSSYVWRNIIPHVAPTHRCIAPDLIGMGKSDKPDLGYFFDDHVRFMDAFIEALNLEEVVLVIHDWGSALGFHWAKRNPERVKGIAFMEFIRPIPTWDEWPEFARETFQAFRTTDVGRKLIIDQNVFIEGTLPMGVVRPLTEVEMDHYREPFLNPVDREPLWRFPNELPIAGEPANIVALVEEYMDWLHQSPVPKLLFWGTPGVLIPPAEAARLAKSLPNCKAVDIGPGLNLLQEDNPDLIGSEIARWLSTLEISG

SEQ ID NO: 1635 - protein, 277 aa, Synthetic construct
MFHYVDVGPRDGTPVLFLHGNPTSSYVWRNIIPHVAPTHRCIAPDLIGMGKSDKPDLGYFFDDHVRFMDAFIEALKLEEVVLVIHDWGSALGFHWAKRNPERVKGIAFMEFIRPIPTWDEWPEFARETFQAFRTTDVGRKLIIDQNVFIEGTLPMGVVRPLTEVEMDHYREPFLNPVDREPLWRFPNELPIAGEPANIVALVEEYMDWLHQSPVPKLLFWGTPGVLIPPAEAARLAKSLPNCKAVDIGPGLNLLQEDNPDLIGSEIARWLSTLEISG

SEQ ID NO: 1636 - protein, 277 aa, Synthetic construct
MFHYVDVGPRDGTPVLFLHGNPTSSYVWRNIIPHVAPTHRCIAPDLIGMGKSDKPDLGYFFDDHVRFMDAFIEALALEEVVLVIHDWGSALGFHWAKRNPERVKGIAFMEFIRPIPTWDEWPEFARETFQAFRTTDVGRKLIIDQNVFIEGTLPMGVVRPLTEVEMDHYREPFLNPVDREPLWRFPNELPIAGEPANIVALVEEYMDWLHQSPVPKLLFWGTPGVLIPPAEAARLAKSLPNCKAVDIGPGLNLLQEDNPDLIGSEIARWLSTLEISG

SEQ ID NO: 1637 - protein, 277 aa, Synthetic construct
MFHYVDVGPRDGTPVLFLHGNPTSSYVWRNIIPHVAPTHRCIAPDLIGMGKSDKPDLGYFFDDHVRFMDAFIEALQLEEVVLVIHDWGSALGFHWAKRNPERVKGIAFMEFIRPIPTWDEWPEFARETFQAFRTTDVGRKLIIDQNVFIEGTLPMGVVRPLTEVEMDHYREPFLNPVDREPLWRFPNELPIAGEPANIVALVEEYMDWLHQSPVPKLLFWGTPGVLIPPAEAARLAKSLPNCKAVDIGPGLNLLQEDNPDLIGSEIARWLSTLEISG

SEQ ID NO: 1638 - protein, 277 aa, Synthetic construct
MFHYVDVGPRDGTPVLFLHGNPTSSYVWRNIIPHVAPTHRCIAPDLIGMGKSDKPDLGYFFDDHVRFMDAFIEALGIEEVVLVIHDWGSALGFHWAKRNPERVKGIAFMEFIRPIPTWDEWPEFARETFQAFRTTDVGRKLIIDQNVFIEGTLPMGVVRPLTEVEMDHYREPFLNPVDREPLWRFPNELPIAGEPANIVALVEEYMDWLHQSPVPKLLFWGTPGVLIPPAEAARLAKSLPNCKAVDIGPGLNLLQEDNPDLIGSEIARWLSTLEISG

SEQ ID NO: 1639 - protein, 277 aa, Synthetic construct
MFHYVDVGPRDGTPVLFLHGNPTSSYVWRNIIPHVAPTHRCIAPDLIGMGKSDKPDLGYFFDDHVRFMDAFIEALGVEEVVLVIHDWGSALGFHWAKRNPERVKGIAFMEFIRPIPTWDEWPEFARETFQAFRTTDVGRKLIIDQNVFIEGTLPMGVVRPLTEVEMDHYREPFLNPVDREPLWRFPNELPIAGEPANIVALVEEYMDWLHQSPVPKLLFWGTPGVLIPPAEAARLAKSLPNCKAVDIGPGLNLLQEDNPDLIGSEIARWLSTLEISG

SEQ ID NO: 1640 - protein, 277 aa, Synthetic construct
MFHYVDVGPRDGTPVLFLHGNPTSSYVWRNIIPHVAPTHRCIAPDLIGMGKSDKPDLGYFFDDHVRFMDAFIEALGFEEVVLVIHDWGSALGFHWAKRNPERVKGIAFMEFIRPIPTWDEWPEFARETFQAFRTTDVGRKLIIDQNVFIEGTLPMGVVRPLTEVEMDHYREPFLNPVDREPLWRFPNELPIAGEPANIVALVEEYMDWLHQSPVPKLLFWGTPGVLIPPAEAARLAKSLPNCKAVDIGPGLNLLQEDNPDLIGSEIARWLSTLEISG

SEQ ID NO: 1641 - protein, 277 aa, Synthetic construct
MFHYVDVGPRDGTPVLFLHGNPTSSYVWRNIIPHVAPTHRCIAPDLIGMGKSDKPDLGYFFDDHVRFMDAFIEALGMEEVVLVIHDWGSALGFHWAKRNPERVKGIAFMEFIRPIPTWDEWPEFARETFQAFRTTDVGRKLIIDQNVFIEGTLPMGVVRPLTEVEMDHYREPFLNPVDREPLWRFPNELPIAGEPANIVALVEEYMDWLHQSPVPKLLFWGTPGVLIPPAEAARLAKSLPNCKAVDIGPGLNLLQEDNPDLIGSEIARWLSTLEISG

SEQ ID NO: 1642 - protein, 277 aa, Synthetic construct
MFHYVDVGPRDGTPVLFLHGNPTSSYVWRNIIPHVAPTHRCIAPDLIGMGKSDKPDLGYFFDDHVRFMDAFIEALGAEEVVLVIHDWGSALGFHWAKRNPERVKGIAFMEFIRPIPTWDEWPEFARETFQAFRTTDVGRKLIIDQNVFIEGTLPMGVVRPLTEVEMDHYREPFLNPVDREPLWRFPNELPIAGEPANIVALVEEYMDWLHQSPVPKLLFWGTPGVLIPPAEAARLAKSLPNCKAVDIGPGLNLLQEDNPDLIGSEIARWLSTLEISG

SEQ ID NO: 1643 - protein, 277 aa, Synthetic construct
MFHYVDVGPRDGTPVLFLHGNPTSSYVWRNIIPHVAPTHRCIAPDLIGMGKSDKPDLGYFFDDHVRFMDAFIEALGCEEVVLVIHDWGSALGFHWAKRNPERVKGIAFMEFIRPIPTWDEWPEFARETFQAFRTTDVGRKLIIDQNVFIEGTLPMGVVRPLTEVEMDHYREPFLNPVDREPLWRFPNELPIAGEPANIVALVEEYMDWLHQSPVPKLLFWGTPGVLIPPAEAARLAKSLPNCKAVDIGPGLNLLQEDNPDLIGSEIARWLSTLEISG

SEQ ID NO: 1644 - protein, 277 aa, Synthetic construct
MFHYVDVGPRDGTPVLFLHGNPTSSYVWRNIIPHVAPTHRCIAPDLIGMGKSDKPDLGYFFDDHVRFMDAFIEALGLDEVVLVIHDWGSALGFHWAKRNPERVKGIAFMEFIRPIPTWDEWPEFARETFQAFRTTDVGRKLIIDQNVFIEGTLPMGVVRPLTEVEMDHYREPFLNPVDREPLWRFPNELPIAGEPANIVALVEEYMDWLHQSPVPKLLFWGTPGVLIPPAEAARLAKSLPNCKAVDIGPGLNLLQEDNPDLIGSEIARWLSTLEISG

SEQ ID NO: 1645 - protein, 277 aa, Synthetic construct
MFHYVDVGPRDGTPVLFLHGNPTSSYVWRNIIPHVAPTHRCIAPDLIGMGKSDKPDLGYFFDDHVRFMDAFIEALGLKEVVLVIHDWGSALGFHWAKRNPERVKGIAFMEFIRPIPTWDEWPEFARETFQAFRTTDVGRKLIIDQNVFIEGTLPMGVVRPLTEVEMDHYREPFLNPVDREPLWRFPNELPIAGEPANIVALVEEYMDWLHQSPVPKLLFWGTPGVLIPPAEAARLAKSLPNCKAVDIGPGLNLLQEDNPDLIGSEIARWLSTLEISG

SEQ ID NO: 1646 - protein, 277 aa, Synthetic construct
MFHYVDVGPRDGTPVLFLHGNPTSSYVWRNIIPHVAPTHRCIAPDLIGMGKSDKPDLGYFFDDHVRFMDAFIEALGLTEVVLVIHDWGSALGFHWAKRNPERVKGIAFMEFIRPIPTWDEWPEFARETFQAFRTTDVGRKLIIDQNVFIEGTLPMGVVRPLTEVEMDHYREPFLNPVDREPLWRFPNELPIAGEPANIVALVEEYMDWLHQSPVPKLLFWGTPGVLIPPAEAARLAKSLPNCKAVDIGPGLNLLQEDNPDLIGSEIARWLSTLEISG

SEQ ID NO: 1647 - protein, 277 aa, Synthetic construct
MFHYVDVGPRDGTPVLFLHGNPTSSYVWRNIIPHVAPTHRCIAPDLIGMGKSDKPDLGYFFDDHVRFMDAFIEALGLSEVVLVIHDWGSALGFHWAKRNPERVKGIAFMEFIRPIPTWDEWPEFARETFQAFRTTDVGRKLIIDQNVFIEGTLPMGVVRPLTEVEMDHYREPFLNPVDREPLWRFPNELPIAGEPANIVALVEEYMDWLHQSPVPKLLFWGTPGVLIPPAEAARLAKSLPNCKAVDIGPGLNLLQEDNPDLIGSEIARWLSTLEISG

SEQ ID NO: 1648 - protein, 277 aa, Synthetic construct
MFHYVDVGPRDGTPVLFLHGNPTSSYVWRNIIPHVAPTHRCIAPDLIGMGKSDKPDLGYFFDDHVRFMDAFIEALGLREVVLVIHDWGSALGFHWAKRNPERVKGIAFMEFIRPIPTWDEWPEFARETFQAFRTTDVGRKLIIDQNVFIEGTLPMGVVRPLTEVEMDHYREPFLNPVDREPLWRFPNELPIAGEPANIVALVEEYMDWLHQSPVPKLLFWGTPGVLIPPAEAARLAKSLPNCKAVDIGPGLNLLQEDNPDLIGSEIARWLSTLEISG

SEQ ID NO: 1649 - protein, 277 aa, Synthetic construct
MFHYVDVGPRDGTPVLFLHGNPTSSYVWRNIIPHVAPTHRCIAPDLIGMGKSDKPDLGYFFDDHVRFMDAFIEALGLNEVVLVIHDWGSALGFHWAKRNPERVKGIAFMEFIRPIPTWDEWPEFARETFQAFRTTDVGRKLIIDQNVFIEGTLPMGVVRPLTEVEMDHYREPFLNPVDREPLWRFPNELPIAGEPANIVALVEEYMDWLHQSPVPKLLFWGTPGVLIPPAEAARLAKSLPNCKAVDIGPGLNLLQEDNPDLIGSEIARWLSTLEISG

SEQ ID NO: 1650 - protein, 277 aa, Synthetic construct
MFHYVDVGPRDGTPVLFLHGNPTSSYVWRNIIPHVAPTHRCIAPDLIGMGKSDKPDLGYFFDDHVRFMDAFIEALGLENVVLVIHDWGSALGFHWAKRNPERVKGIAFMEFIRPIPTWDEWPEFARETFQAFRTTDVGRKLIIDQNVFIEGTLPMGVVRPLTEVEMDHYREPFLNPVDREPLWRFPNELPIAGEPANIVALVEEYMDWLHQSPVPKLLFWGTPGVLIPPAEAARLAKSLPNCKAVDIGPGLNLLQEDNPDLIGSEIARWLSTLEISG

SEQ ID NO: 1651 - protein, 277 aa, Synthetic construct
MFHYVDVGPRDGTPVLFLHGNPTSSYVWRNIIPHVAPTHRCIAPDLIGMGKSDKPDLGYFFDDHVRFMDAFIEALGLERVVLVIHDWGSALGFHWAKRNPERVKGIAFMEFIRPIPTWDEWPEFARETFQAFRTTDVGRKLIIDQNVFIEGTLPMGVVRPLTEVEMDHYREPFLNPVDREPLWRFPNELPIAGEPANIVALVEEYMDWLHQSPVPKLLFWGTPGVLIPPAEAARLAKSLPNCKAVDIGPGLNLLQEDNPDLIGSEIARWLSTLEISG

SEQ ID NO: 1652 - protein, 277 aa, Synthetic construct
MFHYVDVGPRDGTPVLFLHGNPTSSYVWRNIIPHVAPTHRCIAPDLIGMGKSDKPDLGYFFDDHVRFMDAFIEALGLEDVVLVIHDWGSALGFHWAKRNPERVKGIAFMEFIRPIPTWDEWPEFARETFQAFRTTDVGRKLIIDQNVFIEGTLPMGVVRPLTEVEMDHYREPFLNPVDREPLWRFPNELPIAGEPANIVALVEEYMDWLHQSPVPKLLFWGTPGVLIPPAEAARLAKSLPNCKAVDIGPGLNLLQEDNPDLIGSEIARWLSTLEISG

SEQ ID NO: 1653 - protein, 277 aa, Synthetic construct
MFHYVDVGPRDGTPVLFLHGNPTSSYVWRNIIPHVAPTHRCIAPDLIGMGKSDKPDLGYFFDDHVRFMDAFIEALGLEKVVLVIHDWGSALGFHWAKRNPERVKGIAFMEFIRPIPTWDEWPEFARETFQAFRTTDVGRKLIIDQNVFIEGTLPMGVVRPLTEVEMDHYREPFLNPVDREPLWRFPNELPIAGEPANIVALVEEYMDWLHQSPVPKLLFWGTPGVLIPPAEAARLAKSLPNCKAVDIGPGLNLLQEDNPDLIGSEIARWLSTLEISG

SEQ ID NO: 1654 - protein, 277 aa, Synthetic construct
MFHYVDVGPRDGTPVLFLHGNPTSSYVWRNIIPHVAPTHRCIAPDLIGMGKSDKPDLGYFFDDHVRFMDAFIEALGLEQVVLVIHDWGSALGFHWAKRNPERVKGIAFMEFIRPIPTWDEWPEFARETFQAFRTTDVGRKLIIDQNVFIEGTLPMGVVRPLTEVEMDHYREPFLNPVDREPLWRFPNELPIAGEPANIVALVEEYMDWLHQSPVPKLLFWGTPGVLIPPAEAARLAKSLPNCKAVDIGPGLNLLQEDNPDLIGSEIARWLSTLEISG

SEQ ID NO: 1655 - protein, 277 aa, Synthetic construct
MFHYVDVGPRDGTPVLFLHGNPTSSYVWRNIIPHVAPTHRCIAPDLIGMGKSDKPDLGYFFDDHVRFMDAFIEALGLESVVLVIHDWGSALGFHWAKRNPERVKGIAFMEFIRPIPTWDEWPEFARETFQAFRTTDVGRKLIIDQNVFIEGTLPMGVVRPLTEVEMDHYREPFLNPVDREPLWRFPNELPIAGEPANIVALVEEYMDWLHQSPVPKLLFWGTPGVLIPPAEAARLAKSLPNCKAVDIGPGLNLLQEDNPDLIGSEIARWLSTLEISG

SEQ ID NO: 1656 - protein, 277 aa, Synthetic construct
MFHYVDVGPRDGTPVLFLHGNPTSSYVWRNIIPHVAPTHRCIAPDLIGMGKSDKPDLGYFFDDHVRFMDAFIEALGLEEIVLVIHDWGSALGFHWAKRNPERVKGIAFMEFIRPIPTWDEWPEFARETFQAFRTTDVGRKLIIDQNVFIEGTLPMGVVRPLTEVEMDHYREPFLNPVDREPLWRFPNELPIAGEPANIVALVEEYMDWLHQSPVPKLLFWGTPGVLIPPAEAARLAKSLPNCKAVDIGPGLNLLQEDNPDLIGSEIARWLSTLEISG

SEQ ID NO: 1657 - protein, 277 aa, Synthetic construct
MFHYVDVGPRDGTPVLFLHGNPTSSYVWRNIIPHVAPTHRCIAPDLIGMGKSDKPDLGYFFDDHVRFMDAFIEALGLEELVLVIHDWGSALGFHWAKRNPERVKGIAFMEFIRPIPTWDEWPEFARETFQAFRTTDVGRKLIIDQNVFIEGTLPMGVVRPLTEVEMDHYREPFLNPVDREPLWRFPNELPIAGEPANIVALVEEYMDWLHQSPVPKLLFWGTPGVLIPPAEAARLAKSLPNCKAVDIGPGLNLLQEDNPDLIGSEIARWLSTLEISG

SEQ ID NO: 1658 - protein, 277 aa, Synthetic construct
MFHYVDVGPRDGTPVLFLHGNPTSSYVWRNIIPHVAPTHRCIAPDLIGMGKSDKPDLGYFFDDHVRFMDAFIEALGLEEAVLVIHDWGSALGFHWAKRNPERVKGIAFMEFIRPIPTWDEWPEFARETFQAFRTTDVGRKLIIDQNVFIEGTLPMGVVRPLTEVEMDHYREPFLNPVDREPLWRFPNELPIAGEPANIVALVEEYMDWLHQSPVPKLLFWGTPGVLIPPAEAARLAKSLPNCKAVDIGPGLNLLQEDNPDLIGSEIARWLSTLEISG

SEQ ID NO: 1659 - protein, 277 aa, Synthetic construct
MFHYVDVGPRDGTPVLFLHGNPTSSYVWRNIIPHVAPTHRCIAPDLIGMGKSDKPDLGYFFDDHVRFMDAFIEALGLEEMVLVIHDWGSALGFHWAKRNPERVKGIAFMEFIRPIPTWDEWPEFARETFQAFRTTDVGRKLIIDQNVFIEGTLPMGVVRPLTEVEMDHYREPFLNPVDREPLWRFPNELPIAGEPANIVALVEEYMDWLHQSPVPKLLFWGTPGVLIPPAEAARLAKSLPNCKAVDIGPGLNLLQEDNPDLIGSEIARWLSTLEISG

SEQ ID NO: 1660 - protein, 277 aa, Synthetic construct
MFHYVDVGPRDGTPVLFLHGNPTSSYVWRNIIPHVAPTHRCIAPDLIGMGKSDKPDLGYFFDDHVRFMDAFIEALGLEETVLVIHDWGSALGFHWAKRNPERVKGIAFMEFIRPIPTWDEWPEFARETFQAFRTTDVGRKLIIDQNVFIEGTLPMGVVRPLTEVEMDHYREPFLNPVDREPLWRFPNELPIAGEPANIVALVEEYMDWLHQSPVPKLLFWGTPGVLIPPAEAARLAKSLPNCKAVDIGPGLNLLQEDNPDLIGSEIARWLSTLEISG

SEQ ID NO: 1661 - protein, 277 aa, Synthetic construct
MFHYVDVGPRDGTPVLFLHGNPTSSYVWRNIIPHVAPTHRCIAPDLIGMGKSDKPDLGYFFDDHVRFMDAFIEALGLEEFVLVIHDWGSALGFHWAKRNPERVKGIAFMEFIRPIPTWDEWPEFARETFQAFRTTDVGRKLIIDQNVFIEGTLPMGVVRPLTEVEMDHYREPFLNPVDREPLWRFPNELPIAGEPANIVALVEEYMDWLHQSPVPKLLFWGTPGVLIPPAEAARLAKSLPNCKAVDIGPGLNLLQEDNPDLIGSEIARWLSTLEISG

SEQ ID NO: 1662 - protein, 277 aa, Synthetic construct
MFHYVDVGPRDGTPVLFLHGNPTSSYVWRNIIPHVAPTHRCIAPDLIGMGKSDKPDLGYFFDDHVRFMDAFIEALGLEEVTLVIHDWGSALGFHWAKRNPERVKGIAFMEFIRPIPTWDEWPEFARETFQAFRTTDVGRKLIIDQNVFIEGTLPMGVVRPLTEVEMDHYREPFLNPVDREPLWRFPNELPIAGEPANIVALVEEYMDWLHQSPVPKLLFWGTPGVLIPPAEAARLAKSLPNCKAVDIGPGLNLLQEDNPDLIGSEIARWLSTLEISG

SEQ ID NO: 1663 - protein, 277 aa, Synthetic construct
MFHYVDVGPRDGTPVLFLHGNPTSSYVWRNIIPHVAPTHRCIAPDLIGMGKSDKPDLGYFFDDHVRFMDAFIEALGLEEVILVIHDWGSALGFHWAKRNPERVKGIAFMEFIRPIPTWDEWPEFARETFQAFRTTDVGRKLIIDQNVFIEGTLPMGVVRPLTEVEMDHYREPFLNPVDREPLWRFPNELPIAGEPANIVALVEEYMDWLHQSPVPKLLFWGTPGVLIPPAEAARLAKSLPNCKAVDIGPGLNLLQEDNPDLIGSEIARWLSTLEISG

SEQ ID NO: 1664 - protein, 277 aa, Synthetic construct
MFHYVDVGPRDGTPVLFLHGNPTSSYVWRNIIPHVAPTHRCIAPDLIGMGKSDKPDLGYFFDDHVRFMDAFIEALGLEEVALVIHDWGSALGFHWAKRNPERVKGIAFMEFIRPIPTWDEWPEFARETFQAFRTTDVGRKLIIDQNVFIEGTLPMGVVRPLTEVEMDHYREPFLNPVDREPLWRFPNELPIAGEPANIVALVEEYMDWLHQSPVPKLLFWGTPGVLIPPAEAARLAKSLPNCKAVDIGPGLNLLQEDNPDLIGSEIARWLSTLEISG

SEQ ID NO: 1665 - protein, 277 aa, Synthetic construct
MFHYVDVGPRDGTPVLFLHGNPTSSYVWRNIIPHVAPTHRCIAPDLIGMGKSDKPDLGYFFDDHVRFMDAFIEALGLEEVFLVIHDWGSALGFHWAKRNPERVKGIAFMEFIRPIPTWDEWPEFARETFQAFRTTDVGRKLIIDQNVFIEGTLPMGVVRPLTEVEMDHYREPFLNPVDREPLWRFPNELPIAGEPANIVALVEEYMDWLHQSPVPKLLFWGTPGVLIPPAEAARLAKSLPNCKAVDIGPGLNLLQEDNPDLIGSEIARWLSTLEISG

SEQ ID NO: 1666 - protein, 277 aa, Synthetic construct
MFHYVDVGPRDGTPVLFLHGNPTSSYVWRNIIPHVAPTHRCIAPDLIGMGKSDKPDLGYFFDDHVRFMDAFIEALGLEEVLLVIHDWGSALGFHWAKRNPERVKGIAFMEFIRPIPTWDEWPEFARETFQAFRTTDVGRKLIIDQNVFIEGTLPMGVVRPLTEVEMDHYREPFLNPVDREPLWRFPNELPIAGEPANIVALVEEYMDWLHQSPVPKLLFWGTPGVLIPPAEAARLAKSLPNCKAVDIGPGLNLLQEDNPDLIGSEIARWLSTLEISG

SEQ ID NO: 1667 - protein, 277 aa, Synthetic construct
MFHYVDVGPRDGTPVLFLHGNPTSSYVWRNIIPHVAPTHRCIAPDLIGMGKSDKPDLGYFFDDHVRFMDAFIEALGLEEVSLVIHDWGSALGFHWAKRNPERVKGIAFMEFIRPIPTWDEWPEFARETFQAFRTTDVGRKLIIDQNVFIEGTLPMGVVRPLTEVEMDHYREPFLNPVDREPLWRFPNELPIAGEPANIVALVEEYMDWLHQSPVPKLLFWGTPGVLIPPAEAARLAKSLPNCKAVDIGPGLNLLQEDNPDLIGSEIARWLSTLEISG

SEQ ID NO: 1668 - protein, 277 aa, Synthetic construct
MFHYVDVGPRDGTPVLFLHGNPTSSYVWRNIIPHVAPTHRCIAPDLIGMGKSDKPDLGYFFDDHVRFMDAFIEALGLEEVVMVIHDWGSALGFHWAKRNPERVKGIAFMEFIRPIPTWDEWPEFARETFQAFRTTDVGRKLIIDQNVFIEGTLPMGVVRPLTEVEMDHYREPFLNPVDREPLWRFPNELPIAGEPANIVALVEEYMDWLHQSPVPKLLFWGTPGVLIPPAEAARLAKSLPNCKAVDIGPGLNLLQEDNPDLIGSEIARWLSTLEISG

SEQ ID NO: 1669 - protein, 277 aa, Synthetic construct
MFHYVDVGPRDGTPVLFLHGNPTSSYVWRNIIPHVAPTHRCIAPDLIGMGKSDKPDLGYFFDDHVRFMDAFIEALGLEEVVFVIHDWGSALGFHWAKRNPERVKGIAFMEFIRPIPTWDEWPEFARETFQAFRTTDVGRKLIIDQNVFIEGTLPMGVVRPLTEVEMDHYREPFLNPVDREPLWRFPNELPIAGEPANIVALVEEYMDWLHQSPVPKLLFWGTPGVLIPPAEAARLAKSLPNCKAVDIGPGLNLLQEDNPDLIGSEIARWLSTLEISG

SEQ ID NO: 1670 - protein, 277 aa, Synthetic construct
MFHYVDVGPRDGTPVLFLHGNPTSSYVWRNIIPHVAPTHRCIAPDLIGMGKSDKPDLGYFFDDHVRFMDAFIEALGLEEVVIVIHDWGSALGFHWAKRNPERVKGIAFMEFIRPIPTWDEWPEFARETFQAFRTTDVGRKLIIDQNVFIEGTLPMGVVRPLTEVEMDHYREPFLNPVDREPLWRFPNELPIAGEPANIVALVEEYMDWLHQSPVPKLLFWGTPGVLIPPAEAARLAKSLPNCKAVDIGPGLNLLQEDNPDLIGSEIARWLSTLEISG

SEQ ID NO: 1671 - protein, 277 aa, Synthetic construct
MFHYVDVGPRDGTPVLFLHGNPTSSYVWRNIIPHVAPTHRCIAPDLIGMGKSDKPDLGYFFDDHVRFMDAFIEALGLEEVVVVIHDWGSALGFHWAKRNPERVKGIAFMEFIRPIPTWDEWPEFARETFQAFRTTDVGRKLIIDQNVFIEGTLPMGVVRPLTEVEMDHYREPFLNPVDREPLWRFPNELPIAGEPANIVALVEEYMDWLHQSPVPKLLFWGTPGVLIPPAEAARLAKSLPNCKAVDIGPGLNLLQEDNPDLIGSEIARWLSTLEISG

SEQ ID NO: 1672 - protein, 277 aa, Synthetic construct
MFHYVDVGPRDGTPVLFLHGNPTSSYVWRNIIPHVAPTHRCIAPDLIGMGKSDKPDLGYFFDDHVRFMDAFIEALGLEEVVAVIHDWGSALGFHWAKRNPERVKGIAFMEFIRPIPTWDEWPEFARETFQAFRTTDVGRKLIIDQNVFIEGTLPMGVVRPLTEVEMDHYREPFLNPVDREPLWRFPNELPIAGEPANIVALVEEYMDWLHQSPVPKLLFWGTPGVLIPPAEAARLAKSLPNCKAVDIGPGLNLLQEDNPDLIGSEIARWLSTLEISG

SEQ ID NO: 1673 - protein, 277 aa, Synthetic construct
MFHYVDVGPRDGTPVLFLHGNPTSSYVWRNIIPHVAPTHRCIAPDLIGMGKSDKPDLGYFFDDHVRFMDAFIEALGLEEVVPVIHDWGSALGFHWAKRNPERVKGIAFMEFIRPIPTWDEWPEFARETFQAFRTTDVGRKLIIDQNVFIEGTLPMGVVRPLTEVEMDHYREPFLNPVDREPLWRFPNELPIAGEPANIVALVEEYMDWLHQSPVPKLLFWGTPGVLIPPAEAARLAKSLPNCKAVDIGPGLNLLQEDNPDLIGSEIARWLSTLEISG

SEQ ID NO: 1674 - protein, 277 aa, Synthetic construct
MFHYVDVGPRDGTPVLFLHGNPTSSYVWRNIIPHVAPTHRCIAPDLIGMGKSDKPDLGYFFDDHVRFMDAFIEALGLEEVVLIIHDWGSALGFHWAKRNPERVKGIAFMEFIRPIPTWDEWPEFARETFQAFRTTDVGRKLIIDQNVFIEGTLPMGVVRPLTEVEMDHYREPFLNPVDREPLWRFPNELPIAGEPANIVALVEEYMDWLHQSPVPKLLFWGTPGVLIPPAEAARLAKSLPNCKAVDIGPGLNLLQEDNPDLIGSEIARWLSTLEISG

SEQ ID NO: 1675 - protein, 277 aa, Synthetic construct
MFHYVDVGPRDGTPVLFLHGNPTSSYVWRNIIPHVAPTHRCIAPDLIGMGKSDKPDLGYFFDDHVRFMDAFIEALGLEEVVLAIHDWGSALGFHWAKRNPERVKGIAFMEFIRPIPTWDEWPEFARETFQAFRTTDVGRKLIIDQNVFIEGTLPMGVVRPLTEVEMDHYREPFLNPVDREPLWRFPNELPIAGEPANIVALVEEYMDWLHQSPVPKLLFWGTPGVLIPPAEAARLAKSLPNCKAVDIGPGLNLLQEDNPDLIGSEIARWLSTLEISG

SEQ ID NO: 1676 - protein, 277 aa, Synthetic construct
MFHYVDVGPRDGTPVLFLHGNPTSSYVWRNIIPHVAPTHRCIAPDLIGMGKSDKPDLGYFFDDHVRFMDAFIEALGLEEVVLLIHDWGSALGFHWAKRNPERVKGIAFMEFIRPIPTWDEWPEFARETFQAFRTTDVGRKLIIDQNVFIEGTLPMGVVRPLTEVEMDHYREPFLNPVDREPLWRFPNELPIAGEPANIVALVEEYMDWLHQSPVPKLLFWGTPGVLIPPAEAARLAKSLPNCKAVDIGPGLNLLQEDNPDLIGSEIARWLSTLEISG

SEQ ID NO: 1677 - protein, 277 aa, Synthetic construct
MFHYVDVGPRDGTPVLFLHGNPTSSYVWRNIIPHVAPTHRCIAPDLIGMGKSDKPDLGYFFDDHVRFMDAFIEALGLEEVVLMIHDWGSALGFHWAKRNPERVKGIAFMEFIRPIPTWDEWPEFARETFQAFRTTDVGRKLIIDQNVFIEGTLPMGVVRPLTEVEMDHYREPFLNPVDREPLWRFPNELPIAGEPANIVALVEEYMDWLHQSPVPKLLFWGTPGVLIPPAEAARLAKSLPNCKAVDIGPGLNLLQEDNPDLIGSEIARWLSTLEISG

SEQ ID NO: 1678 - protein, 277 aa, Synthetic construct
MFHYVDVGPRDGTPVLFLHGNPTSSYVWRNIIPHVAPTHRCIAPDLIGMGKSDKPDLGYFFDDHVRFMDAFIEALGLEEVVLCIHDWGSALGFHWAKRNPERVKGIAFMEFIRPIPTWDEWPEFARETFQAFRTTDVGRKLIIDQNVFIEGTLPMGVVRPLTEVEMDHYREPFLNPVDREPLWRFPNELPIAGEPANIVALVEEYMDWLHQSPVPKLLFWGTPGVLIPPAEAARLAKSLPNCKAVDIGPGLNLLQEDNPDLIGSEIARWLSTLEISG

SEQ ID NO: 1679 - protein, 277 aa, Synthetic construct
MFHYVDVGPRDGTPVLFLHGNPTSSYVWRNIIPHVAPTHRCIAPDLIGMGKSDKPDLGYFFDDHVRFMDAFIEALGLEEVVLFIHDWGSALGFHWAKRNPERVKGIAFMEFIRPIPTWDEWPEFARETFQAFRTTDVGRKLIIDQNVFIEGTLPMGVVRPLTEVEMDHYREPFLNPVDREPLWRFPNELPIAGEPANIVALVEEYMDWLHQSPVPKLLFWGTPGVLIPPAEAARLAKSLPNCKAVDIGPGLNLLQEDNPDLIGSEIARWLSTLEISG

SEQ ID NO: 1680 - protein, 277 aa, Synthetic construct
MFHYVDVGPRDGTPVLFLHGNPTSSYVWRNIIPHVAPTHRCIAPDLIGMGKSDKPDLGYFFDDHVRFMDAFIEALGLEEVVLVVHDWGSALGFHWAKRNPERVKGIAFMEFIRPIPTWDEWPEFARETFQAFRTTDVGRKLIIDQNVFIEGTLPMGVVRPLTEVEMDHYREPFLNPVDREPLWRFPNELPIAGEPANIVALVEEYMDWLHQSPVPKLLFWGTPGVLIPPAEAARLAKSLPNCKAVDIGPGLNLLQEDNPDLIGSEIARWLSTLEISG

SEQ ID NO: 1681 - protein, 277 aa, Synthetic construct
MFHYVDVGPRDGTPVLFLHGNPTSSYVWRNIIPHVAPTHRCIAPDLIGMGKSDKPDLGYFFDDHVRFMDAFIEALGLEEVVLVLHDWGSALGFHWAKRNPERVKGIAFMEFIRPIPTWDEWPEFARETFQAFRTTDVGRKLIIDQNVFIEGTLPMGVVRPLTEVEMDHYREPFLNPVDREPLWRFPNELPIAGEPANIVALVEEYMDWLHQSPVPKLLFWGTPGVLIPPAEAARLAKSLPNCKAVDIGPGLNLLQEDNPDLIGSEIARWLSTLEISG

SEQ ID NO: 1682 - protein, 277 aa, Synthetic construct
MFHYVDVGPRDGTPVLFLHGNPTSSYVWRNIIPHVAPTHRCIAPDLIGMGKSDKPDLGYFFDDHVRFMDAFIEALGLEEVVLVMHDWGSALGFHWAKRNPERVKGIAFMEFIRPIPTWDEWPEFARETFQAFRTTDVGRKLIIDQNVFIEGTLPMGVVRPLTEVEMDHYREPFLNPVDREPLWRFPNELPIAGEPANIVALVEEYMDWLHQSPVPKLLFWGTPGVLIPPAEAARLAKSLPNCKAVDIGPGLNLLQEDNPDLIGSEIARWLSTLEISG

SEQ ID NO: 1683 - protein, 277 aa, Synthetic construct
MFHYVDVGPRDGTPVLFLHGNPTSSYVWRNIIPHVAPTHRCIAPDLIGMGKSDKPDLGYFFDDHVRFMDAFIEALGLEEVVLVGHDWGSALGFHWAKRNPERVKGIAFMEFIRPIPTWDEWPEFARETFQAFRTTDVGRKLIIDQNVFIEGTLPMGVVRPLTEVEMDHYREPFLNPVDREPLWRFPNELPIAGEPANIVALVEEYMDWLHQSPVPKLLFWGTPGVLIPPAEAARLAKSLPNCKAVDIGPGLNLLQEDNPDLIGSEIARWLSTLEISG

SEQ ID NO: 1684 - protein, 277 aa, Synthetic construct
MFHYVDVGPRDGTPVLFLHGNPTSSYVWRNIIPHVAPTHRCIAPDLIGMGKSDKPDLGYFFDDHVRFMDAFIEALGLEEVVLVAHDWGSALGFHWAKRNPERVKGIAFMEFIRPIPTWDEWPEFARETFQAFRTTDVGRKLIIDQNVFIEGTLPMGVVRPLTEVEMDHYREPFLNPVDREPLWRFPNELPIAGEPANIVALVEEYMDWLHQSPVPKLLFWGTPGVLIPPAEAARLAKSLPNCKAVDIGPGLNLLQEDNPDLIGSEIARWLSTLEISG

SEQ ID NO: 1685 - protein, 277 aa, Synthetic construct
MFHYVDVGPRDGTPVLFLHGNPTSSYVWRNIIPHVAPTHRCIAPDLIGMGKSDKPDLGYFFDDHVRFMDAFIEALGLEEVVLVCHDWGSALGFHWAKRNPERVKGIAFMEFIRPIPTWDEWPEFARETFQAFRTTDVGRKLIIDQNVFIEGTLPMGVVRPLTEVEMDHYREPFLNPVDREPLWRFPNELPIAGEPANIVALVEEYMDWLHQSPVPKLLFWGTPGVLIPPAEAARLAKSLPNCKAVDIGPGLNLLQEDNPDLIGSEIARWLSTLEISG

SEQ ID NO: 1686 - protein, 277 aa, Synthetic construct
MFHYVDVGPRDGTPVLFLHGNPTSSYVWRNIIPHVAPTHRCIAPDLIGMGKSDKPDLGYFFDDHVRFMDAFIEALGLEEVVLVIQDWGSALGFHWAKRNPERVKGIAFMEFIRPIPTWDEWPEFARETFQAFRTTDVGRKLIIDQNVFIEGTLPMGVVRPLTEVEMDHYREPFLNPVDREPLWRFPNELPIAGEPANIVALVEEYMDWLHQSPVPKLLFWGTPGVLIPPAEAARLAKSLPNCKAVDIGPGLNLLQEDNPDLIGSEIARWLSTLEISG

SEQ ID NO: 1687 - protein, 277 aa, Synthetic construct
MFHYVDVGPRDGTPVLFLHGNPTSSYVWRNIIPHVAPTHRCIAPDLIGMGKSDKPDLGYFFDDHVRFMDAFIEALGLEEVVLVINDWGSALGFHWAKRNPERVKGIAFMEFIRPIPTWDEWPEFARETFQAFRTTDVGRKLIIDQNVFIEGTLPMGVVRPLTEVEMDHYREPFLNPVDREPLWRFPNELPIAGEPANIVALVEEYMDWLHQSPVPKLLFWGTPGVLIPPAEAARLAKSLPNCKAVDIGPGLNLLQEDNPDLIGSEIARWLSTLEISG

SEQ ID NO: 1688 - protein, 277 aa, Synthetic construct
MFHYVDVGPRDGTPVLFLHGNPTSSYVWRNIIPHVAPTHRCIAPDLIGMGKSDKPDLGYFFDDHVRFMDAFIEALGLEEVVLVISDWGSALGFHWAKRNPERVKGIAFMEFIRPIPTWDEWPEFARETFQAFRTTDVGRKLIIDQNVFIEGTLPMGVVRPLTEVEMDHYREPFLNPVDREPLWRFPNELPIAGEPANIVALVEEYMDWLHQSPVPKLLFWGTPGVLIPPAEAARLAKSLPNCKAVDIGPGLNLLQEDNPDLIGSEIARWLSTLEISG

SEQ ID NO: 1689 - protein, 277 aa, Synthetic construct
MFHYVDVGPRDGTPVLFLHGNPTSSYVWRNIIPHVAPTHRCIAPDLIGMGKSDKPDLGYFFDDHVRFMDAFIEALGLEEVVLVITDWGSALGFHWAKRNPERVKGIAFMEFIRPIPTWDEWPEFARETFQAFRTTDVGRKLIIDQNVFIEGTLPMGVVRPLTEVEMDHYREPFLNPVDREPLWRFPNELPIAGEPANIVALVEEYMDWLHQSPVPKLLFWGTPGVLIPPAEAARLAKSLPNCKAVDIGPGLNLLQEDNPDLIGSEIARWLSTLEISG

SEQ ID NO: 1690 - protein, 277 aa, Synthetic construct
MFHYVDVGPRDGTPVLFLHGNPTSSYVWRNIIPHVAPTHRCIAPDLIGMGKSDKPDLGYFFDDHVRFMDAFIEALGLEEVVLVIPDWGSALGFHWAKRNPERVKGIAFMEFIRPIPTWDEWPEFARETFQAFRTTDVGRKLIIDQNVFIEGTLPMGVVRPLTEVEMDHYREPFLNPVDREPLWRFPNELPIAGEPANIVALVEEYMDWLHQSPVPKLLFWGTPGVLIPPAEAARLAKSLPNCKAVDIGPGLNLLQEDNPDLIGSEIARWLSTLEISG

SEQ ID NO: 1691 - protein, 277 aa, Synthetic construct
MFHYVDVGPRDGTPVLFLHGNPTSSYVWRNIIPHVAPTHRCIAPDLIGMGKSDKPDLGYFFDDHVRFMDAFIEALGLEEVVLVIADWGSALGFHWAKRNPERVKGIAFMEFIRPIPTWDEWPEFARETFQAFRTTDVGRKLIIDQNVFIEGTLPMGVVRPLTEVEMDHYREPFLNPVDREPLWRFPNELPIAGEPANIVALVEEYMDWLHQSPVPKLLFWGTPGVLIPPAEAARLAKSLPNCKAVDIGPGLNLLQEDNPDLIGSEIARWLSTLEISG

SEQ ID NO: 1692 - protein, 277 aa, Synthetic construct
MFHYVDVGPRDGTPVLFLHGNPTSSYVWRNIIPHVAPTHRCIAPDLIGMGKSDKPDLGYFFDDHVRFMDAFIEALGLEEVVLVIHGWGSALGFHWAKRNPERVKGIAFMEFIRPIPTWDEWPEFARETFQAFRTTDVGRKLIIDQNVFIEGTLPMGVVRPLTEVEMDHYREPFLNPVDREPLWRFPNELPIAGEPANIVALVEEYMDWLHQSPVPKLLFWGTPGVLIPPAEAARLAKSLPNCKAVDIGPGLNLLQEDNPDLIGSEIARWLSTLEISG

SEQ ID NO: 1693 - protein, 277 aa, Synthetic construct
MFHYVDVGPRDGTPVLFLHGNPTSSYVWRNIIPHVAPTHRCIAPDLIGMGKSDKPDLGYFFDDHVRFMDAFIEALGLEEVVLVIHEWGSALGFHWAKRNPERVKGIAFMEFIRPIPTWDEWPEFARETFQAFRTTDVGRKLIIDQNVFIEGTLPMGVVRPLTEVEMDHYREPFLNPVDREPLWRFPNELPIAGEPANIVALVEEYMDWLHQSPVPKLLFWGTPGVLIPPAEAARLAKSLPNCKAVDIGPGLNLLQEDNPDLIGSEIARWLSTLEISG

SEQ ID NO: 1694 - protein, 277 aa, Synthetic construct
MFHYVDVGPRDGTPVLFLHGNPTSSYVWRNIIPHVAPTHRCIAPDLIGMGKSDKPDLGYFFDDHVRFMDAFIEALGLEEVVLVIHNWGSALGFHWAKRNPERVKGIAFMEFIRPIPTWDEWPEFARETFQAFRTTDVGRKLIIDQNVFIEGTLPMGVVRPLTEVEMDHYREPFLNPVDREPLWRFPNELPIAGEPANIVALVEEYMDWLHQSPVPKLLFWGTPGVLIPPAEAARLAKSLPNCKAVDIGPGLNLLQEDNPDLIGSEIARWLSTLEISG

SEQ ID NO: 1695 - protein, 277 aa, Synthetic construct
MFHYVDVGPRDGTPVLFLHGNPTSSYVWRNIIPHVAPTHRCIAPDLIGMGKSDKPDLGYFFDDHVRFMDAFIEALGLEEVVLVIHSWGSALGFHWAKRNPERVKGIAFMEFIRPIPTWDEWPEFARETFQAFRTTDVGRKLIIDQNVFIEGTLPMGVVRPLTEVEMDHYREPFLNPVDREPLWRFPNELPIAGEPANIVALVEEYMDWLHQSPVPKLLFWGTPGVLIPPAEAARLAKSLPNCKAVDIGPGLNLLQEDNPDLIGSEIARWLSTLEISG

SEQ ID NO: 1696 - protein, 277 aa, Synthetic construct
MFHYVDVGPRDGTPVLFLHGNPTSSYVWRNIIPHVAPTHRCIAPDLIGMGKSDKPDLGYFFDDHVRFMDAFIEALGLEEVVLVIHAWGSALGFHWAKRNPERVKGIAFMEFIRPIPTWDEWPEFARETFQAFRTTDVGRKLIIDQNVFIEGTLPMGVVRPLTEVEMDHYREPFLNPVDREPLWRFPNELPIAGEPANIVALVEEYMDWLHQSPVPKLLFWGTPGVLIPPAEAARLAKSLPNCKAVDIGPGLNLLQEDNPDLIGSEIARWLSTLEISG

SEQ ID NO: 1697 - protein, 277 aa, Synthetic construct
MFHYVDVGPRDGTPVLFLHGNPTSSYVWRNIIPHVAPTHRCIAPDLIGMGKSDKPDLGYFFDDHVRFMDAFIEALGLEEVVLVIHHWGSALGFHWAKRNPERVKGIAFMEFIRPIPTWDEWPEFARETFQAFRTTDVGRKLIIDQNVFIEGTLPMGVVRPLTEVEMDHYREPFLNPVDREPLWRFPNELPIAGEPANIVALVEEYMDWLHQSPVPKLLFWGTPGVLIPPAEAARLAKSLPNCKAVDIGPGLNLLQEDNPDLIGSEIARWLSTLEISG

SEQ ID NO: 1698 - protein, 277 aa, Synthetic construct
MFHYVDVGPRDGTPVLFLHGNPTSSYVWRNIIPHVAPTHRCIAPDLIGMGKSDKPDLGYFFDDHVRFMDAFIEALGLEEVVLVIHDFGSALGFHWAKRNPERVKGIAFMEFIRPIPTWDEWPEFARETFQAFRTTDVGRKLIIDQNVFIEGTLPMGVVRPLTEVEMDHYREPFLNPVDREPLWRFPNELPIAGEPANIVALVEEYMDWLHQSPVPKLLFWGTPGVLIPPAEAARLAKSLPNCKAVDIGPGLNLLQEDNPDLIGSEIARWLSTLEISG

SEQ ID NO: 1699 - protein, 277 aa, Synthetic construct
MFHYVDVGPRDGTPVLFLHGNPTSSYVWRNIIPHVAPTHRCIAPDLIGMGKSDKPDLGYFFDDHVRFMDAFIEALGLEEVVLVIHDYGSALGFHWAKRNPERVKGIAFMEFIRPIPTWDEWPEFARETFQAFRTTDVGRKLIIDQNVFIEGTLPMGVVRPLTEVEMDHYREPFLNPVDREPLWRFPNELPIAGEPANIVALVEEYMDWLHQSPVPKLLFWGTPGVLIPPAEAARLAKSLPNCKAVDIGPGLNLLQEDNPDLIGSEIARWLSTLEISG

SEQ ID NO: 1700 - protein, 277 aa, Synthetic construct
MFHYVDVGPRDGTPVLFLHGNPTSSYVWRNIIPHVAPTHRCIAPDLIGMGKSDKPDLGYFFDDHVRFMDAFIEALGLEEVVLVIHDLGSALGFHWAKRNPERVKGIAFMEFIRPIPTWDEWPEFARETFQAFRTTDVGRKLIIDQNVFIEGTLPMGVVRPLTEVEMDHYREPFLNPVDREPLWRFPNELPIAGEPANIVALVEEYMDWLHQSPVPKLLFWGTPGVLIPPAEAARLAKSLPNCKAVDIGPGLNLLQEDNPDLIGSEIARWLSTLEISG

SEQ ID NO: 1701 - protein, 277 aa, Synthetic construct
MFHYVDVGPRDGTPVLFLHGNPTSSYVWRNIIPHVAPTHRCIAPDLIGMGKSDKPDLGYFFDDHVRFMDAFIEALGLEEVVLVIHDSGSALGFHWAKRNPERVKGIAFMEFIRPIPTWDEWPEFARETFQAFRTTDVGRKLIIDQNVFIEGTLPMGVVRPLTEVEMDHYREPFLNPVDREPLWRFPNELPIAGEPANIVALVEEYMDWLHQSPVPKLLFWGTPGVLIPPAEAARLAKSLPNCKAVDIGPGLNLLQEDNPDLIGSEIARWLSTLEISG

SEQ ID NO: 1702 - protein, 277 aa, Synthetic construct
MFHYVDVGPRDGTPVLFLHGNPTSSYVWRNIIPHVAPTHRCIAPDLIGMGKSDKPDLGYFFDDHVRFMDAFIEALGLEEVVLVIHDIGSALGFHWAKRNPERVKGIAFMEFIRPIPTWDEWPEFARETFQAFRTTDVGRKLIIDQNVFIEGTLPMGVVRPLTEVEMDHYREPFLNPVDREPLWRFPNELPIAGEPANIVALVEEYMDWLHQSPVPKLLFWGTPGVLIPPAEAARLAKSLPNCKAVDIGPGLNLLQEDNPDLIGSEIARWLSTLEISG

SEQ ID NO: 1703 - protein, 277 aa, Synthetic construct
MFHYVDVGPRDGTPVLFLHGNPTSSYVWRNIIPHVAPTHRCIAPDLIGMGKSDKPDLGYFFDDHVRFMDAFIEALGLEEVVLVIHDMGSALGFHWAKRNPERVKGIAFMEFIRPIPTWDEWPEFARETFQAFRTTDVGRKLIIDQNVFIEGTLPMGVVRPLTEVEMDHYREPFLNPVDREPLWRFPNELPIAGEPANIVALVEEYMDWLHQSPVPKLLFWGTPGVLIPPAEAARLAKSLPNCKAVDIGPGLNLLQEDNPDLIGSEIARWLSTLEISG

SEQ ID NO: 1704 - protein, 277 aa, Synthetic construct
MFHYVDVGPRDGTPVLFLHGNPTSSYVWRNIIPHVAPTHRCIAPDLIGMGKSDKPDLGYFFDDHVRFMDAFIEALGLEEVVLVIHDWASALGFHWAKRNPERVKGIAFMEFIRPIPTWDEWPEFARETFQAFRTTDVGRKLIIDQNVFIEGTLPMGVVRPLTEVEMDHYREPFLNPVDREPLWRFPNELPIAGEPANIVALVEEYMDWLHQSPVPKLLFWGTPGVLIPPAEAARLAKSLPNCKAVDIGPGLNLLQEDNPDLIGSEIARWLSTLEISG

SEQ ID NO: 1705 - protein, 277 aa, Synthetic construct
MFHYVDVGPRDGTPVLFLHGNPTSSYVWRNIIPHVAPTHRCIAPDLIGMGKSDKPDLGYFFDDHVRFMDAFIEALGLEEVVLVIHDWSSALGFHWAKRNPERVKGIAFMEFIRPIPTWDEWPEFARETFQAFRTTDVGRKLIIDQNVFIEGTLPMGVVRPLTEVEMDHYREPFLNPVDREPLWRFPNELPIAGEPANIVALVEEYMDWLHQSPVPKLLFWGTPGVLIPPAEAARLAKSLPNCKAVDIGPGLNLLQEDNPDLIGSEIARWLSTLEISG

SEQ ID NO: 1706 - protein, 277 aa, Synthetic construct
MFHYVDVGPRDGTPVLFLHGNPTSSYVWRNIIPHVAPTHRCIAPDLIGMGKSDKPDLGYFFDDHVRFMDAFIEALGLEEVVLVIHDWCSALGFHWAKRNPERVKGIAFMEFIRPIPTWDEWPEFARETFQAFRTTDVGRKLIIDQNVFIEGTLPMGVVRPLTEVEMDHYREPFLNPVDREPLWRFPNELPIAGEPANIVALVEEYMDWLHQSPVPKLLFWGTPGVLIPPAEAARLAKSLPNCKAVDIGPGLNLLQEDNPDLIGSEIARWLSTLEISG

SEQ ID NO: 1707 - protein, 277 aa, Synthetic construct
MFHYVDVGPRDGTPVLFLHGNPTSSYVWRNIIPHVAPTHRCIAPDLIGMGKSDKPDLGYFFDDHVRFMDAFIEALGLEEVVLVIHDWDSALGFHWAKRNPERVKGIAFMEFIRPIPTWDEWPEFARETFQAFRTTDVGRKLIIDQNVFIEGTLPMGVVRPLTEVEMDHYREPFLNPVDREPLWRFPNELPIAGEPANIVALVEEYMDWLHQSPVPKLLFWGTPGVLIPPAEAARLAKSLPNCKAVDIGPGLNLLQEDNPDLIGSEIARWLSTLEISG

SEQ ID NO: 1708 - protein, 277 aa, Synthetic construct
MFHYVDVGPRDGTPVLFLHGNPTSSYVWRNIIPHVAPTHRCIAPDLIGMGKSDKPDLGYFFDDHVRFMDAFIEALGLEEVVLVIHDWTSALGFHWAKRNPERVKGIAFMEFIRPIPTWDEWPEFARETFQAFRTTDVGRKLIIDQNVFIEGTLPMGVVRPLTEVEMDHYREPFLNPVDREPLWRFPNELPIAGEPANIVALVEEYMDWLHQSPVPKLLFWGTPGVLIPPAEAARLAKSLPNCKAVDIGPGLNLLQEDNPDLIGSEIARWLSTLEISG

SEQ ID NO: 1709 - protein, 277 aa, Synthetic construct
MFHYVDVGPRDGTPVLFLHGNPTSSYVWRNIIPHVAPTHRCIAPDLIGMGKSDKPDLGYFFDDHVRFMDAFIEALGLEEVVLVIHDWVSALGFHWAKRNPERVKGIAFMEFIRPIPTWDEWPEFARETFQAFRTTDVGRKLIIDQNVFIEGTLPMGVVRPLTEVEMDHYREPFLNPVDREPLWRFPNELPIAGEPANIVALVEEYMDWLHQSPVPKLLFWGTPGVLIPPAEAARLAKSLPNCKAVDIGPGLNLLQEDNPDLIGSEIARWLSTLEISG

SEQ ID NO: 1710 - protein, 277 aa, Synthetic construct
MFHYVDVGPRDGTPVLFLHGNPTSSYVWRNIIPHVAPTHRCIAPDLIGMGKSDKPDLGYFFDDHVRFMDAFIEALGLEEVVLVIHDWGTALGFHWAKRNPERVKGIAFMEFIRPIPTWDEWPEFARETFQAFRTTDVGRKLIIDQNVFIEGTLPMGVVRPLTEVEMDHYREPFLNPVDREPLWRFPNELPIAGEPANIVALVEEYMDWLHQSPVPKLLFWGTPGVLIPPAEAARLAKSLPNCKAVDIGPGLNLLQEDNPDLIGSEIARWLSTLEISG

SEQ ID NO: 1711 - protein, 277 aa, Synthetic construct
MFHYVDVGPRDGTPVLFLHGNPTSSYVWRNIIPHVAPTHRCIAPDLIGMGKSDKPDLGYFFDDHVRFMDAFIEALGLEEVVLVIHDWGAALGFHWAKRNPERVKGIAFMEFIRPIPTWDEWPEFARETFQAFRTTDVGRKLIIDQNVFIEGTLPMGVVRPLTEVEMDHYREPFLNPVDREPLWRFPNELPIAGEPANIVALVEEYMDWLHQSPVPKLLFWGTPGVLIPPAEAARLAKSLPNCKAVDIGPGLNLLQEDNPDLIGSEIARWLSTLEISG

SEQ ID NO: 1712 - protein, 277 aa, Synthetic construct
MFHYVDVGPRDGTPVLFLHGNPTSSYVWRNIIPHVAPTHRCIAPDLIGMGKSDKPDLGYFFDDHVRFMDAFIEALGLEEVVLVIHDWGGALGFHWAKRNPERVKGIAFMEFIRPIPTWDEWPEFARETFQAFRTTDVGRKLIIDQNVFIEGTLPMGVVRPLTEVEMDHYREPFLNPVDREPLWRFPNELPIAGEPANIVALVEEYMDWLHQSPVPKLLFWGTPGVLIPPAEAARLAKSLPNCKAVDIGPGLNLLQEDNPDLIGSEIARWLSTLEISG

SEQ ID NO: 1713 - protein, 277 aa, Synthetic construct
MFHYVDVGPRDGTPVLFLHGNPTSSYVWRNIIPHVAPTHRCIAPDLIGMGKSDKPDLGYFFDDHVRFMDAFIEALGLEEVVLVIHDWGCALGFHWAKRNPERVKGIAFMEFIRPIPTWDEWPEFARETFQAFRTTDVGRKLIIDQNVFIEGTLPMGVVRPLTEVEMDHYREPFLNPVDREPLWRFPNELPIAGEPANIVALVEEYMDWLHQSPVPKLLFWGTPGVLIPPAEAARLAKSLPNCKAVDIGPGLNLLQEDNPDLIGSEIARWLSTLEISG

SEQ ID NO: 1714 - protein, 277 aa, Synthetic construct
MFHYVDVGPRDGTPVLFLHGNPTSSYVWRNIIPHVAPTHRCIAPDLIGMGKSDKPDLGYFFDDHVRFMDAFIEALGLEEVVLVIHDWGNALGFHWAKRNPERVKGIAFMEFIRPIPTWDEWPEFARETFQAFRTTDVGRKLIIDQNVFIEGTLPMGVVRPLTEVEMDHYREPFLNPVDREPLWRFPNELPIAGEPANIVALVEEYMDWLHQSPVPKLLFWGTPGVLIPPAEAARLAKSLPNCKAVDIGPGLNLLQEDNPDLIGSEIARWLSTLEISG

SEQ ID NO: 1715 - protein, 277 aa, Synthetic construct
MFHYVDVGPRDGTPVLFLHGNPTSSYVWRNIIPHVAPTHRCIAPDLIGMGKSDKPDLGYFFDDHVRFMDAFIEALGLEEVVLVIHDWGVALGFHWAKRNPERVKGIAFMEFIRPIPTWDEWPEFARETFQAFRTTDVGRKLIIDQNVFIEGTLPMGVVRPLTEVEMDHYREPFLNPVDREPLWRFPNELPIAGEPANIVALVEEYMDWLHQSPVPKLLFWGTPGVLIPPAEAARLAKSLPNCKAVDIGPGLNLLQEDNPDLIGSEIARWLSTLEISG

SEQ ID NO: 1716 - protein, 277 aa, Synthetic construct
MFHYVDVGPRDGTPVLFLHGNPTSSYVWRNIIPHVAPTHRCIAPDLIGMGKSDKPDLGYFFDDHVRFMDAFIEALGLEEVVLVIHDWGSGLGFHWAKRNPERVKGIAFMEFIRPIPTWDEWPEFARETFQAFRTTDVGRKLIIDQNVFIEGTLPMGVVRPLTEVEMDHYREPFLNPVDREPLWRFPNELPIAGEPANIVALVEEYMDWLHQSPVPKLLFWGTPGVLIPPAEAARLAKSLPNCKAVDIGPGLNLLQEDNPDLIGSEIARWLSTLEISG

SEQ ID NO: 1717 - protein, 277 aa, Synthetic construct
MFHYVDVGPRDGTPVLFLHGNPTSSYVWRNIIPHVAPTHRCIAPDLIGMGKSDKPDLGYFFDDHVRFMDAFIEALGLEEVVLVIHDWGSSLGFHWAKRNPERVKGIAFMEFIRPIPTWDEWPEFARETFQAFRTTDVGRKLIIDQNVFIEGTLPMGVVRPLTEVEMDHYREPFLNPVDREPLWRFPNELPIAGEPANIVALVEEYMDWLHQSPVPKLLFWGTPGVLIPPAEAARLAKSLPNCKAVDIGPGLNLLQEDNPDLIGSEIARWLSTLEISG

SEQ ID NO: 1718 - protein, 277 aa, Synthetic construct
MFHYVDVGPRDGTPVLFLHGNPTSSYVWRNIIPHVAPTHRCIAPDLIGMGKSDKPDLGYFFDDHVRFMDAFIEALGLEEVVLVIHDWGSVLGFHWAKRNPERVKGIAFMEFIRPIPTWDEWPEFARETFQAFRTTDVGRKLIIDQNVFIEGTLPMGVVRPLTEVEMDHYREPFLNPVDREPLWRFPNELPIAGEPANIVALVEEYMDWLHQSPVPKLLFWGTPGVLIPPAEAARLAKSLPNCKAVDIGPGLNLLQEDNPDLIGSEIARWLSTLEISG

SEQ ID NO: 1719 - protein, 277 aa, Synthetic construct
MFHYVDVGPRDGTPVLFLHGNPTSSYVWRNIIPHVAPTHRCIAPDLIGMGKSDKPDLGYFFDDHVRFMDAFIEALGLEEVVLVIHDWGSPLGFHWAKRNPERVKGIAFMEFIRPIPTWDEWPEFARETFQAFRTTDVGRKLIIDQNVFIEGTLPMGVVRPLTEVEMDHYREPFLNPVDREPLWRFPNELPIAGEPANIVALVEEYMDWLHQSPVPKLLFWGTPGVLIPPAEAARLAKSLPNCKAVDIGPGLNLLQEDNPDLIGSEIARWLSTLEISG

SEQ ID NO: 1720 - protein, 277 aa, Synthetic construct
MFHYVDVGPRDGTPVLFLHGNPTSSYVWRNIIPHVAPTHRCIAPDLIGMGKSDKPDLGYFFDDHVRFMDAFIEALGLEEVVLVIHDWGSTLGFHWAKRNPERVKGIAFMEFIRPIPTWDEWPEFARETFQAFRTTDVGRKLIIDQNVFIEGTLPMGVVRPLTEVEMDHYREPFLNPVDREPLWRFPNELPIAGEPANIVALVEEYMDWLHQSPVPKLLFWGTPGVLIPPAEAARLAKSLPNCKAVDIGPGLNLLQEDNPDLIGSEIARWLSTLEISG

SEQ ID NO: 1721 - protein, 277 aa, Synthetic construct
MFHYVDVGPRDGTPVLFLHGNPTSSYVWRNIIPHVAPTHRCIAPDLIGMGKSDKPDLGYFFDDHVRFMDAFIEALGLEEVVLVIHDWGSILGFHWAKRNPERVKGIAFMEFIRPIPTWDEWPEFARETFQAFRTTDVGRKLIIDQNVFIEGTLPMGVVRPLTEVEMDHYREPFLNPVDREPLWRFPNELPIAGEPANIVALVEEYMDWLHQSPVPKLLFWGTPGVLIPPAEAARLAKSLPNCKAVDIGPGLNLLQEDNPDLIGSEIARWLSTLEISG

SEQ ID NO: 1722 - protein, 277 aa, Synthetic construct
MFHYVDVGPRDGTPVLFLHGNPTSSYVWRNIIPHVAPTHRCIAPDLIGMGKSDKPDLGYFFDDHVRFMDAFIEALGLEEVVLVIHDWGSAIGFHWAKRNPERVKGIAFMEFIRPIPTWDEWPEFARETFQAFRTTDVGRKLIIDQNVFIEGTLPMGVVRPLTEVEMDHYREPFLNPVDREPLWRFPNELPIAGEPANIVALVEEYMDWLHQSPVPKLLFWGTPGVLIPPAEAARLAKSLPNCKAVDIGPGLNLLQEDNPDLIGSEIARWLSTLEISG

SEQ ID NO: 1723 - protein, 277 aa, Synthetic construct
MFHYVDVGPRDGTPVLFLHGNPTSSYVWRNIIPHVAPTHRCIAPDLIGMGKSDKPDLGYFFDDHVRFMDAFIEALGLEEVVLVIHDWGSAVGFHWAKRNPERVKGIAFMEFIRPIPTWDEWPEFARETFQAFRTTDVGRKLIIDQNVFIEGTLPMGVVRPLTEVEMDHYREPFLNPVDREPLWRFPNELPIAGEPANIVALVEEYMDWLHQSPVPKLLFWGTPGVLIPPAEAARLAKSLPNCKAVDIGPGLNLLQEDNPDLIGSEIARWLSTLEISG

SEQ ID NO: 1724 - protein, 277 aa, Synthetic construct
MFHYVDVGPRDGTPVLFLHGNPTSSYVWRNIIPHVAPTHRCIAPDLIGMGKSDKPDLGYFFDDHVRFMDAFIEALGLEEVVLVIHDWGSAFGFHWAKRNPERVKGIAFMEFIRPIPTWDEWPEFARETFQAFRTTDVGRKLIIDQNVFIEGTLPMGVVRPLTEVEMDHYREPFLNPVDREPLWRFPNELPIAGEPANIVALVEEYMDWLHQSPVPKLLFWGTPGVLIPPAEAARLAKSLPNCKAVDIGPGLNLLQEDNPDLIGSEIARWLSTLEISG

SEQ ID NO: 1725 - protein, 277 aa, Synthetic construct
MFHYVDVGPRDGTPVLFLHGNPTSSYVWRNIIPHVAPTHRCIAPDLIGMGKSDKPDLGYFFDDHVRFMDAFIEALGLEEVVLVIHDWGSAMGFHWAKRNPERVKGIAFMEFIRPIPTWDEWPEFARETFQAFRTTDVGRKLIIDQNVFIEGTLPMGVVRPLTEVEMDHYREPFLNPVDREPLWRFPNELPIAGEPANIVALVEEYMDWLHQSPVPKLLFWGTPGVLIPPAEAARLAKSLPNCKAVDIGPGLNLLQEDNPDLIGSEIARWLSTLEISG

SEQ ID NO: 1726 - protein, 277 aa, Synthetic construct
MFHYVDVGPRDGTPVLFLHGNPTSSYVWRNIIPHVAPTHRCIAPDLIGMGKSDKPDLGYFFDDHVRFMDAFIEALGLEEVVLVIHDWGSAAGFHWAKRNPERVKGIAFMEFIRPIPTWDEWPEFARETFQAFRTTDVGRKLIIDQNVFIEGTLPMGVVRPLTEVEMDHYREPFLNPVDREPLWRFPNELPIAGEPANIVALVEEYMDWLHQSPVPKLLFWGTPGVLIPPAEAARLAKSLPNCKAVDIGPGLNLLQEDNPDLIGSEIARWLSTLEISG

SEQ ID NO: 1727 - protein, 277 aa, Synthetic construct
MFHYVDVGPRDGTPVLFLHGNPTSSYVWRNIIPHVAPTHRCIAPDLIGMGKSDKPDLGYFFDDHVRFMDAFIEALGLEEVVLVIHDWGSATGFHWAKRNPERVKGIAFMEFIRPIPTWDEWPEFARETFQAFRTTDVGRKLIIDQNVFIEGTLPMGVVRPLTEVEMDHYREPFLNPVDREPLWRFPNELPIAGEPANIVALVEEYMDWLHQSPVPKLLFWGTPGVLIPPAEAARLAKSLPNCKAVDIGPGLNLLQEDNPDLIGSEIARWLSTLEISG

SEQ ID NO: 1728 - protein, 277 aa, Synthetic construct
MFHYVDVGPRDGTPVLFLHGNPTSSYVWRNIIPHVAPTHRCIAPDLIGMGKSDKPDLGYFFDDHVRFMDAFIEALGLEEVVLVIHDWGSALAFHWAKRNPERVKGIAFMEFIRPIPTWDEWPEFARETFQAFRTTDVGRKLIIDQNVFIEGTLPMGVVRPLTEVEMDHYREPFLNPVDREPLWRFPNELPIAGEPANIVALVEEYMDWLHQSPVPKLLFWGTPGVLIPPAEAARLAKSLPNCKAVDIGPGLNLLQEDNPDLIGSEIARWLSTLEISG

SEQ ID NO: 1729 - protein, 277 aa, Synthetic construct
MFHYVDVGPRDGTPVLFLHGNPTSSYVWRNIIPHVAPTHRCIAPDLIGMGKSDKPDLGYFFDDHVRFMDAFIEALGLEEVVLVIHDWGSALSFHWAKRNPERVKGIAFMEFIRPIPTWDEWPEFARETFQAFRTTDVGRKLIIDQNVFIEGTLPMGVVRPLTEVEMDHYREPFLNPVDREPLWRFPNELPIAGEPANIVALVEEYMDWLHQSPVPKLLFWGTPGVLIPPAEAARLAKSLPNCKAVDIGPGLNLLQEDNPDLIGSEIARWLSTLEISG

SEQ ID NO: 1730 - protein, 277 aa, Synthetic construct
MFHYVDVGPRDGTPVLFLHGNPTSSYVWRNIIPHVAPTHRCIAPDLIGMGKSDKPDLGYFFDDHVRFMDAFIEALGLEEVVLVIHDWGSALTFHWAKRNPERVKGIAFMEFIRPIPTWDEWPEFARETFQAFRTTDVGRKLIIDQNVFIEGTLPMGVVRPLTEVEMDHYREPFLNPVDREPLWRFPNELPIAGEPANIVALVEEYMDWLHQSPVPKLLFWGTPGVLIPPAEAARLAKSLPNCKAVDIGPGLNLLQEDNPDLIGSEIARWLSTLEISG

SEQ ID NO: 1731 - protein, 277 aa, Synthetic construct
MFHYVDVGPRDGTPVLFLHGNPTSSYVWRNIIPHVAPTHRCIAPDLIGMGKSDKPDLGYFFDDHVRFMDAFIEALGLEEVVLVIHDWGSALCFHWAKRNPERVKGIAFMEFIRPIPTWDEWPEFARETFQAFRTTDVGRKLIIDQNVFIEGTLPMGVVRPLTEVEMDHYREPFLNPVDREPLWRFPNELPIAGEPANIVALVEEYMDWLHQSPVPKLLFWGTPGVLIPPAEAARLAKSLPNCKAVDIGPGLNLLQEDNPDLIGSEIARWLSTLEISG

SEQ ID NO: 1732 - protein, 277 aa, Synthetic construct
MFHYVDVGPRDGTPVLFLHGNPTSSYVWRNIIPHVAPTHRCIAPDLIGMGKSDKPDLGYFFDDHVRFMDAFIEALGLEEVVLVIHDWGSALVFHWAKRNPERVKGIAFMEFIRPIPTWDEWPEFARETFQAFRTTDVGRKLIIDQNVFIEGTLPMGVVRPLTEVEMDHYREPFLNPVDREPLWRFPNELPIAGEPANIVALVEEYMDWLHQSPVPKLLFWGTPGVLIPPAEAARLAKSLPNCKAVDIGPGLNLLQEDNPDLIGSEIARWLSTLEISG

SEQ ID NO: 1733 - protein, 277 aa, Synthetic construct
MFHYVDVGPRDGTPVLFLHGNPTSSYVWRNIIPHVAPTHRCIAPDLIGMGKSDKPDLGYFFDDHVRFMDAFIEALGLEEVVLVIHDWGSALNFHWAKRNPERVKGIAFMEFIRPIPTWDEWPEFARETFQAFRTTDVGRKLIIDQNVFIEGTLPMGVVRPLTEVEMDHYREPFLNPVDREPLWRFPNELPIAGEPANIVALVEEYMDWLHQSPVPKLLFWGTPGVLIPPAEAARLAKSLPNCKAVDIGPGLNLLQEDNPDLIGSEIARWLSTLEISG

SEQ ID NO: 1734 - protein, 277 aa, Synthetic construct
MFHYVDVGPRDGTPVLFLHGNPTSSYVWRNIIPHVAPTHRCIAPDLIGMGKSDKPDLGYFFDDHVRFMDAFIEALGLEEVVLVIHDWGSALGLHWAKRNPERVKGIAFMEFIRPIPTWDEWPEFARETFQAFRTTDVGRKLIIDQNVFIEGTLPMGVVRPLTEVEMDHYREPFLNPVDREPLWRFPNELPIAGEPANIVALVEEYMDWLHQSPVPKLLFWGTPGVLIPPAEAARLAKSLPNCKAVDIGPGLNLLQEDNPDLIGSEIARWLSTLEISG

SEQ ID NO: 1735 - protein, 277 aa, Synthetic construct
MFHYVDVGPRDGTPVLFLHGNPTSSYVWRNIIPHVAPTHRCIAPDLIGMGKSDKPDLGYFFDDHVRFMDAFIEALGLEEVVLVIHDWGSALGMHWAKRNPERVKGIAFMEFIRPIPTWDEWPEFARETFQAFRTTDVGRKLIIDQNVFIEGTLPMGVVRPLTEVEMDHYREPFLNPVDREPLWRFPNELPIAGEPANIVALVEEYMDWLHQSPVPKLLFWGTPGVLIPPAEAARLAKSLPNCKAVDIGPGLNLLQEDNPDLIGSEIARWLSTLEISG

SEQ ID NO: 1736 - protein, 277 aa, Synthetic construct
MFHYVDVGPRDGTPVLFLHGNPTSSYVWRNIIPHVAPTHRCIAPDLIGMGKSDKPDLGYFFDDHVRFMDAFIEALGLEEVVLVIHDWGSALGYHWAKRNPERVKGIAFMEFIRPIPTWDEWPEFARETFQAFRTTDVGRKLIIDQNVFIEGTLPMGVVRPLTEVEMDHYREPFLNPVDREPLWRFPNELPIAGEPANIVALVEEYMDWLHQSPVPKLLFWGTPGVLIPPAEAARLAKSLPNCKAVDIGPGLNLLQEDNPDLIGSEIARWLSTLEISG

SEQ ID NO: 1737 - protein, 277 aa, Synthetic construct
MFHYVDVGPRDGTPVLFLHGNPTSSYVWRNIIPHVAPTHRCIAPDLIGMGKSDKPDLGYFFDDHVRFMDAFIEALGLEEVVLVIHDWGSALGIHWAKRNPERVKGIAFMEFIRPIPTWDEWPEFARETFQAFRTTDVGRKLIIDQNVFIEGTLPMGVVRPLTEVEMDHYREPFLNPVDREPLWRFPNELPIAGEPANIVALVEEYMDWLHQSPVPKLLFWGTPGVLIPPAEAARLAKSLPNCKAVDIGPGLNLLQEDNPDLIGSEIARWLSTLEISG

SEQ ID NO: 1738 - protein, 277 aa, Synthetic construct
MFHYVDVGPRDGTPVLFLHGNPTSSYVWRNIIPHVAPTHRCIAPDLIGMGKSDKPDLGYFFDDHVRFMDAFIEALGLEEVVLVIHDWGSALGVHWAKRNPERVKGIAFMEFIRPIPTWDEWPEFARETFQAFRTTDVGRKLIIDQNVFIEGTLPMGVVRPLTEVEMDHYREPFLNPVDREPLWRFPNELPIAGEPANIVALVEEYMDWLHQSPVPKLLFWGTPGVLIPPAEAARLAKSLPNCKAVDIGPGLNLLQEDNPDLIGSEIARWLSTLEISG

SEQ ID NO: 1739 - protein, 277 aa, Synthetic construct
MFHYVDVGPRDGTPVLFLHGNPTSSYVWRNIIPHVAPTHRCIAPDLIGMGKSDKPDLGYFFDDHVRFMDAFIEALGLEEVVLVIHDWGSALGAHWAKRNPERVKGIAFMEFIRPIPTWDEWPEFARETFQAFRTTDVGRKLIIDQNVFIEGTLPMGVVRPLTEVEMDHYREPFLNPVDREPLWRFPNELPIAGEPANIVALVEEYMDWLHQSPVPKLLFWGTPGVLIPPAEAARLAKSLPNCKAVDIGPGLNLLQEDNPDLIGSEIARWLSTLEISG

SEQ ID NO: 1740 - protein, 277 aa, Synthetic construct
MFHYVDVGPRDGTPVLFLHGNPTSSYVWRNIIPHVAPTHRCIAPDLIGMGKSDKPDLGYFFDDHVRFMDAFIEALGLEEVVLVIHDWGSALGFNWAKRNPERVKGIAFMEFIRPIPTWDEWPEFARETFQAFRTTDVGRKLIIDQNVFIEGTLPMGVVRPLTEVEMDHYREPFLNPVDREPLWRFPNELPIAGEPANIVALVEEYMDWLHQSPVPKLLFWGTPGVLIPPAEAARLAKSLPNCKAVDIGPGLNLLQEDNPDLIGSEIARWLSTLEISG

SEQ ID NO: 1741 - protein, 277 aa, Synthetic construct
MFHYVDVGPRDGTPVLFLHGNPTSSYVWRNIIPHVAPTHRCIAPDLIGMGKSDKPDLGYFFDDHVRFMDAFIEALGLEEVVLVIHDWGSALGFDWAKRNPERVKGIAFMEFIRPIPTWDEWPEFARETFQAFRTTDVGRKLIIDQNVFIEGTLPMGVVRPLTEVEMDHYREPFLNPVDREPLWRFPNELPIAGEPANIVALVEEYMDWLHQSPVPKLLFWGTPGVLIPPAEAARLAKSLPNCKAVDIGPGLNLLQEDNPDLIGSEIARWLSTLEISG

SEQ ID NO: 1742 - protein, 277 aa, Synthetic construct
MFHYVDVGPRDGTPVLFLHGNPTSSYVWRNIIPHVAPTHRCIAPDLIGMGKSDKPDLGYFFDDHVRFMDAFIEALGLEEVVLVIHDWGSALGFAWAKRNPERVKGIAFMEFIRPIPTWDEWPEFARETFQAFRTTDVGRKLIIDQNVFIEGTLPMGVVRPLTEVEMDHYREPFLNPVDREPLWRFPNELPIAGEPANIVALVEEYMDWLHQSPVPKLLFWGTPGVLIPPAEAARLAKSLPNCKAVDIGPGLNLLQEDNPDLIGSEIARWLSTLEISG

SEQ ID NO: 1743 - protein, 277 aa, Synthetic construct
MFHYVDVGPRDGTPVLFLHGNPTSSYVWRNIIPHVAPTHRCIAPDLIGMGKSDKPDLGYFFDDHVRFMDAFIEALGLEEVVLVIHDWGSALGFYWAKRNPERVKGIAFMEFIRPIPTWDEWPEFARETFQAFRTTDVGRKLIIDQNVFIEGTLPMGVVRPLTEVEMDHYREPFLNPVDREPLWRFPNELPIAGEPANIVALVEEYMDWLHQSPVPKLLFWGTPGVLIPPAEAARLAKSLPNCKAVDIGPGLNLLQEDNPDLIGSEIARWLSTLEISG

SEQ ID NO: 1744 - protein, 277 aa, Synthetic construct
MFHYVDVGPRDGTPVLFLHGNPTSSYVWRNIIPHVAPTHRCIAPDLIGMGKSDKPDLGYFFDDHVRFMDAFIEALGLEEVVLVIHDWGSALGFRWAKRNPERVKGIAFMEFIRPIPTWDEWPEFARETFQAFRTTDVGRKLIIDQNVFIEGTLPMGVVRPLTEVEMDHYREPFLNPVDREPLWRFPNELPIAGEPANIVALVEEYMDWLHQSPVPKLLFWGTPGVLIPPAEAARLAKSLPNCKAVDIGPGLNLLQEDNPDLIGSEIARWLSTLEISG

SEQ ID NO: 1745 - protein, 277 aa, Synthetic construct
MFHYVDVGPRDGTPVLFLHGNPTSSYVWRNIIPHVAPTHRCIAPDLIGMGKSDKPDLGYFFDDHVRFMDAFIEALGLEEVVLVIHDWGSALGFQWAKRNPERVKGIAFMEFIRPIPTWDEWPEFARETFQAFRTTDVGRKLIIDQNVFIEGTLPMGVVRPLTEVEMDHYREPFLNPVDREPLWRFPNELPIAGEPANIVALVEEYMDWLHQSPVPKLLFWGTPGVLIPPAEAARLAKSLPNCKAVDIGPGLNLLQEDNPDLIGSEIARWLSTLEISG

SEQ ID NO: 1746 - protein, 277 aa, Synthetic construct
MFHYVDVGPRDGTPVLFLHGNPTSSYVWRNIIPHVAPTHRCIAPDLIGMGKSDKPDLGYFFDDHVRFMDAFIEALGLEEVVLVIHDWGSALGFHYAKRNPERVKGIAFMEFIRPIPTWDEWPEFARETFQAFRTTDVGRKLIIDQNVFIEGTLPMGVVRPLTEVEMDHYREPFLNPVDREPLWRFPNELPIAGEPANIVALVEEYMDWLHQSPVPKLLFWGTPGVLIPPAEAARLAKSLPNCKAVDIGPGLNLLQEDNPDLIGSEIARWLSTLEISG

SEQ ID NO: 1747 - protein, 277 aa, Synthetic construct
MFHYVDVGPRDGTPVLFLHGNPTSSYVWRNIIPHVAPTHRCIAPDLIGMGKSDKPDLGYFFDDHVRFMDAFIEALGLEEVVLVIHDWGSALGFHFAKRNPERVKGIAFMEFIRPIPTWDEWPEFARETFQAFRTTDVGRKLIIDQNVFIEGTLPMGVVRPLTEVEMDHYREPFLNPVDREPLWRFPNELPIAGEPANIVALVEEYMDWLHQSPVPKLLFWGTPGVLIPPAEAARLAKSLPNCKAVDIGPGLNLLQEDNPDLIGSEIARWLSTLEISG

SEQ ID NO: 1748 - protein, 277 aa, Synthetic construct
MFHYVDVGPRDGTPVLFLHGNPTSSYVWRNIIPHVAPTHRCIAPDLIGMGKSDKPDLGYFFDDHVRFMDAFIEALGLEEVVLVIHDWGSALGFHLAKRNPERVKGIAFMEFIRPIPTWDEWPEFARETFQAFRTTDVGRKLIIDQNVFIEGTLPMGVVRPLTEVEMDHYREPFLNPVDREPLWRFPNELPIAGEPANIVALVEEYMDWLHQSPVPKLLFWGTPGVLIPPAEAARLAKSLPNCKAVDIGPGLNLLQEDNPDLIGSEIARWLSTLEISG

SEQ ID NO: 1749 - protein, 277 aa, Synthetic construct
MFHYVDVGPRDGTPVLFLHGNPTSSYVWRNIIPHVAPTHRCIAPDLIGMGKSDKPDLGYFFDDHVRFMDAFIEALGLEEVVLVIHDWGSALGFHVAKRNPERVKGIAFMEFIRPIPTWDEWPEFARETFQAFRTTDVGRKLIIDQNVFIEGTLPMGVVRPLTEVEMDHYREPFLNPVDREPLWRFPNELPIAGEPANIVALVEEYMDWLHQSPVPKLLFWGTPGVLIPPAEAARLAKSLPNCKAVDIGPGLNLLQEDNPDLIGSEIARWLSTLEISG

SEQ ID NO: 1750 - protein, 277 aa, Synthetic construct
MFHYVDVGPRDGTPVLFLHGNPTSSYVWRNIIPHVAPTHRCIAPDLIGMGKSDKPDLGYFFDDHVRFMDAFIEALGLEEVVLVIHDWGSALGFHIAKRNPERVKGIAFMEFIRPIPTWDEWPEFARETFQAFRTTDVGRKLIIDQNVFIEGTLPMGVVRPLTEVEMDHYREPFLNPVDREPLWRFPNELPIAGEPANIVALVEEYMDWLHQSPVPKLLFWGTPGVLIPPAEAARLAKSLPNCKAVDIGPGLNLLQEDNPDLIGSEIARWLSTLEISG

SEQ ID NO: 1751 - protein, 277 aa, Synthetic construct
MFHYVDVGPRDGTPVLFLHGNPTSSYVWRNIIPHVAPTHRCIAPDLIGMGKSDKPDLGYFFDDHVRFMDAFIEALGLEEVVLVIHDWGSALGFHHAKRNPERVKGIAFMEFIRPIPTWDEWPEFARETFQAFRTTDVGRKLIIDQNVFIEGTLPMGVVRPLTEVEMDHYREPFLNPVDREPLWRFPNELPIAGEPANIVALVEEYMDWLHQSPVPKLLFWGTPGVLIPPAEAARLAKSLPNCKAVDIGPGLNLLQEDNPDLIGSEIARWLSTLEISG

SEQ ID NO: 1752 - protein, 277 aa, Synthetic construct
MFHYVDVGPRDGTPVLFLHGNPTSSYVWRNIIPHVAPTHRCIAPDLIGMGKSDKPDLGYFFDDHVRFMDAFIEALGLEEVVLVIHDWGSALGFHWVKRNPERVKGIAFMEFIRPIPTWDEWPEFARETFQAFRTTDVGRKLIIDQNVFIEGTLPMGVVRPLTEVEMDHYREPFLNPVDREPLWRFPNELPIAGEPANIVALVEEYMDWLHQSPVPKLLFWGTPGVLIPPAEAARLAKSLPNCKAVDIGPGLNLLQEDNPDLIGSEIARWLSTLEISG

SEQ ID NO: 1753 - protein, 277 aa, Synthetic construct
MFHYVDVGPRDGTPVLFLHGNPTSSYVWRNIIPHVAPTHRCIAPDLIGMGKSDKPDLGYFFDDHVRFMDAFIEALGLEEVVLVIHDWGSALGFHWSKRNPERVKGIAFMEFIRPIPTWDEWPEFARETFQAFRTTDVGRKLIIDQNVFIEGTLPMGVVRPLTEVEMDHYREPFLNPVDREPLWRFPNELPIAGEPANIVALVEEYMDWLHQSPVPKLLFWGTPGVLIPPAEAARLAKSLPNCKAVDIGPGLNLLQEDNPDLIGSEIARWLSTLEISG

SEQ ID NO: 1754 - protein, 277 aa, Synthetic construct
MFHYVDVGPRDGTPVLFLHGNPTSSYVWRNIIPHVAPTHRCIAPDLIGMGKSDKPDLGYFFDDHVRFMDAFIEALGLEEVVLVIHDWGSALGFHWGKRNPERVKGIAFMEFIRPIPTWDEWPEFARETFQAFRTTDVGRKLIIDQNVFIEGTLPMGVVRPLTEVEMDHYREPFLNPVDREPLWRFPNELPIAGEPANIVALVEEYMDWLHQSPVPKLLFWGTPGVLIPPAEAARLAKSLPNCKAVDIGPGLNLLQEDNPDLIGSEIARWLSTLEISG

SEQ ID NO: 1755 - protein, 277 aa, Synthetic construct
MFHYVDVGPRDGTPVLFLHGNPTSSYVWRNIIPHVAPTHRCIAPDLIGMGKSDKPDLGYFFDDHVRFMDAFIEALGLEEVVLVIHDWGSALGFHWTKRNPERVKGIAFMEFIRPIPTWDEWPEFARETFQAFRTTDVGRKLIIDQNVFIEGTLPMGVVRPLTEVEMDHYREPFLNPVDREPLWRFPNELPIAGEPANIVALVEEYMDWLHQSPVPKLLFWGTPGVLIPPAEAARLAKSLPNCKAVDIGPGLNLLQEDNPDLIGSEIARWLSTLEISG

SEQ ID NO: 1756 - protein, 277 aa, Synthetic construct
MFHYVDVGPRDGTPVLFLHGNPTSSYVWRNIIPHVAPTHRCIAPDLIGMGKSDKPDLGYFFDDHVRFMDAFIEALGLEEVVLVIHDWGSALGFHWCKRNPERVKGIAFMEFIRPIPTWDEWPEFARETFQAFRTTDVGRKLIIDQNVFIEGTLPMGVVRPLTEVEMDHYREPFLNPVDREPLWRFPNELPIAGEPANIVALVEEYMDWLHQSPVPKLLFWGTPGVLIPPAEAARLAKSLPNCKAVDIGPGLNLLQEDNPDLIGSEIARWLSTLEISG

SEQ ID NO: 1757 - protein, 277 aa, Synthetic construct
MFHYVDVGPRDGTPVLFLHGNPTSSYVWRNIIPHVAPTHRCIAPDLIGMGKSDKPDLGYFFDDHVRFMDAFIEALGLEEVVLVIHDWGSALGFHWLKRNPERVKGIAFMEFIRPIPTWDEWPEFARETFQAFRTTDVGRKLIIDQNVFIEGTLPMGVVRPLTEVEMDHYREPFLNPVDREPLWRFPNELPIAGEPANIVALVEEYMDWLHQSPVPKLLFWGTPGVLIPPAEAARLAKSLPNCKAVDIGPGLNLLQEDNPDLIGSEIARWLSTLEISG

SEQ ID NO: 1758 - protein, 277 aa, Synthetic construct
MFHYVDVGPRDGTPVLFLHGNPTSSYVWRNIIPHVAPTHRCIAPDLIGMGKSDKPDLGYFFDDHVRFMDAFIEALGLEEVVLVIHDWGSALGFHWARRNPERVKGIAFMEFIRPIPTWDEWPEFARETFQAFRTTDVGRKLIIDQNVFIEGTLPMGVVRPLTEVEMDHYREPFLNPVDREPLWRFPNELPIAGEPANIVALVEEYMDWLHQSPVPKLLFWGTPGVLIPPAEAARLAKSLPNCKAVDIGPGLNLLQEDNPDLIGSEIARWLSTLEISG

SEQ ID NO: 1759 - protein, 277 aa, Synthetic construct
MFHYVDVGPRDGTPVLFLHGNPTSSYVWRNIIPHVAPTHRCIAPDLIGMGKSDKPDLGYFFDDHVRFMDAFIEALGLEEVVLVIHDWGSALGFHWAARNPERVKGIAFMEFIRPIPTWDEWPEFARETFQAFRTTDVGRKLIIDQNVFIEGTLPMGVVRPLTEVEMDHYREPFLNPVDREPLWRFPNELPIAGEPANIVALVEEYMDWLHQSPVPKLLFWGTPGVLIPPAEAARLAKSLPNCKAVDIGPGLNLLQEDNPDLIGSEIARWLSTLEISG

SEQ ID NO: 1760 - protein, 277 aa, Synthetic construct
MFHYVDVGPRDGTPVLFLHGNPTSSYVWRNIIPHVAPTHRCIAPDLIGMGKSDKPDLGYFFDDHVRFMDAFIEALGLEEVVLVIHDWGSALGFHWANRNPERVKGIAFMEFIRPIPTWDEWPEFARETFQAFRTTDVGRKLIIDQNVFIEGTLPMGVVRPLTEVEMDHYREPFLNPVDREPLWRFPNELPIAGEPANIVALVEEYMDWLHQSPVPKLLFWGTPGVLIPPAEAARLAKSLPNCKAVDIGPGLNLLQEDNPDLIGSEIARWLSTLEISG

SEQ ID NO: 1761 - protein, 277 aa, Synthetic construct
MFHYVDVGPRDGTPVLFLHGNPTSSYVWRNIIPHVAPTHRCIAPDLIGMGKSDKPDLGYFFDDHVRFMDAFIEALGLEEVVLVIHDWGSALGFHWAHRNPERVKGIAFMEFIRPIPTWDEWPEFARETFQAFRTTDVGRKLIIDQNVFIEGTLPMGVVRPLTEVEMDHYREPFLNPVDREPLWRFPNELPIAGEPANIVALVEEYMDWLHQSPVPKLLFWGTPGVLIPPAEAARLAKSLPNCKAVDIGPGLNLLQEDNPDLIGSEIARWLSTLEISG

SEQ ID NO: 1762 - protein, 277 aa, Synthetic construct
MFHYVDVGPRDGTPVLFLHGNPTSSYVWRNIIPHVAPTHRCIAPDLIGMGKSDKPDLGYFFDDHVRFMDAFIEALGLEEVVLVIHDWGSALGFHWASRNPERVKGIAFMEFIRPIPTWDEWPEFARETFQAFRTTDVGRKLIIDQNVFIEGTLPMGVVRPLTEVEMDHYREPFLNPVDREPLWRFPNELPIAGEPANIVALVEEYMDWLHQSPVPKLLFWGTPGVLIPPAEAARLAKSLPNCKAVDIGPGLNLLQEDNPDLIGSEIARWLSTLEISG

SEQ ID NO: 1763 - protein, 277 aa, Synthetic construct
MFHYVDVGPRDGTPVLFLHGNPTSSYVWRNIIPHVAPTHRCIAPDLIGMGKSDKPDLGYFFDDHVRFMDAFIEALGLEEVVLVIHDWGSALGFHWAQRNPERVKGIAFMEFIRPIPTWDEWPEFARETFQAFRTTDVGRKLIIDQNVFIEGTLPMGVVRPLTEVEMDHYREPFLNPVDREPLWRFPNELPIAGEPANIVALVEEYMDWLHQSPVPKLLFWGTPGVLIPPAEAARLAKSLPNCKAVDIGPGLNLLQEDNPDLIGSEIARWLSTLEISG

SEQ ID NO: 1764 - protein, 277 aa, Synthetic construct
MFHYVDVGPRDGTPVLFLHGNPTSSYVWRNIIPHVAPTHRCIAPDLIGMGKSDKPDLGYFFDDHVRFMDAFIEALGLEEVVLVIHDWGSALGFHWAKKNPERVKGIAFMEFIRPIPTWDEWPEFARETFQAFRTTDVGRKLIIDQNVFIEGTLPMGVVRPLTEVEMDHYREPFLNPVDREPLWRFPNELPIAGEPANIVALVEEYMDWLHQSPVPKLLFWGTPGVLIPPAEAARLAKSLPNCKAVDIGPGLNLLQEDNPDLIGSEIARWLSTLEISG

SEQ ID NO: 1765 - protein, 277 aa, Synthetic construct
MFHYVDVGPRDGTPVLFLHGNPTSSYVWRNIIPHVAPTHRCIAPDLIGMGKSDKPDLGYFFDDHVRFMDAFIEALGLEEVVLVIHDWGSALGFHWAKQNPERVKGIAFMEFIRPIPTWDEWPEFARETFQAFRTTDVGRKLIIDQNVFIEGTLPMGVVRPLTEVEMDHYREPFLNPVDREPLWRFPNELPIAGEPANIVALVEEYMDWLHQSPVPKLLFWGTPGVLIPPAEAARLAKSLPNCKAVDIGPGLNLLQEDNPDLIGSEIARWLSTLEISG

SEQ ID NO: 1766 - protein, 277 aa, Synthetic construct
MFHYVDVGPRDGTPVLFLHGNPTSSYVWRNIIPHVAPTHRCIAPDLIGMGKSDKPDLGYFFDDHVRFMDAFIEALGLEEVVLVIHDWGSALGFHWAKANPERVKGIAFMEFIRPIPTWDEWPEFARETFQAFRTTDVGRKLIIDQNVFIEGTLPMGVVRPLTEVEMDHYREPFLNPVDREPLWRFPNELPIAGEPANIVALVEEYMDWLHQSPVPKLLFWGTPGVLIPPAEAARLAKSLPNCKAVDIGPGLNLLQEDNPDLIGSEIARWLSTLEISG

SEQ ID NO: 1767 - protein, 277 aa, Synthetic construct
MFHYVDVGPRDGTPVLFLHGNPTSSYVWRNIIPHVAPTHRCIAPDLIGMGKSDKPDLGYFFDDHVRFMDAFIEALGLEEVVLVIHDWGSALGFHWAKTNPERVKGIAFMEFIRPIPTWDEWPEFARETFQAFRTTDVGRKLIIDQNVFIEGTLPMGVVRPLTEVEMDHYREPFLNPVDREPLWRFPNELPIAGEPANIVALVEEYMDWLHQSPVPKLLFWGTPGVLIPPAEAARLAKSLPNCKAVDIGPGLNLLQEDNPDLIGSEIARWLSTLEISG

SEQ ID NO: 1768 - protein, 277 aa, Synthetic construct
MFHYVDVGPRDGTPVLFLHGNPTSSYVWRNIIPHVAPTHRCIAPDLIGMGKSDKPDLGYFFDDHVRFMDAFIEALGLEEVVLVIHDWGSALGFHWAKHNPERVKGIAFMEFIRPIPTWDEWPEFARETFQAFRTTDVGRKLIIDQNVFIEGTLPMGVVRPLTEVEMDHYREPFLNPVDREPLWRFPNELPIAGEPANIVALVEEYMDWLHQSPVPKLLFWGTPGVLIPPAEAARLAKSLPNCKAVDIGPGLNLLQEDNPDLIGSEIARWLSTLEISG

SEQ ID NO: 1769 - protein, 277 aa, Synthetic construct
MFHYVDVGPRDGTPVLFLHGNPTSSYVWRNIIPHVAPTHRCIAPDLIGMGKSDKPDLGYFFDDHVRFMDAFIEALGLEEVVLVIHDWGSALGFHWAKSNPERVKGIAFMEFIRPIPTWDEWPEFARETFQAFRTTDVGRKLIIDQNVFIEGTLPMGVVRPLTEVEMDHYREPFLNPVDREPLWRFPNELPIAGEPANIVALVEEYMDWLHQSPVPKLLFWGTPGVLIPPAEAARLAKSLPNCKAVDIGPGLNLLQEDNPDLIGSEIARWLSTLEISG

SEQ ID NO: 1770 - protein, 277 aa, Synthetic construct
MFHYVDVGPRDGTPVLFLHGNPTSSYVWRNIIPHVAPTHRCIAPDLIGMGKSDKPDLGYFFDDHVRFMDAFIEALGLEEVVLVIHDWGSALGFHWAKRHPERVKGIAFMEFIRPIPTWDEWPEFARETFQAFRTTDVGRKLIIDQNVFIEGTLPMGVVRPLTEVEMDHYREPFLNPVDREPLWRFPNELPIAGEPANIVALVEEYMDWLHQSPVPKLLFWGTPGVLIPPAEAARLAKSLPNCKAVDIGPGLNLLQEDNPDLIGSEIARWLSTLEISG

SEQ ID NO: 1771 - protein, 277 aa, Synthetic construct
MFHYVDVGPRDGTPVLFLHGNPTSSYVWRNIIPHVAPTHRCIAPDLIGMGKSDKPDLGYFFDDHVRFMDAFIEALGLEEVVLVIHDWGSALGFHWAKRYPERVKGIAFMEFIRPIPTWDEWPEFARETFQAFRTTDVGRKLIIDQNVFIEGTLPMGVVRPLTEVEMDHYREPFLNPVDREPLWRFPNELPIAGEPANIVALVEEYMDWLHQSPVPKLLFWGTPGVLIPPAEAARLAKSLPNCKAVDIGPGLNLLQEDNPDLIGSEIARWLSTLEISG

SEQ ID NO: 1772 - protein, 277 aa, Synthetic construct
MFHYVDVGPRDGTPVLFLHGNPTSSYVWRNIIPHVAPTHRCIAPDLIGMGKSDKPDLGYFFDDHVRFMDAFIEALGLEEVVLVIHDWGSALGFHWAKRRPERVKGIAFMEFIRPIPTWDEWPEFARETFQAFRTTDVGRKLIIDQNVFIEGTLPMGVVRPLTEVEMDHYREPFLNPVDREPLWRFPNELPIAGEPANIVALVEEYMDWLHQSPVPKLLFWGTPGVLIPPAEAARLAKSLPNCKAVDIGPGLNLLQEDNPDLIGSEIARWLSTLEISG

SEQ ID NO: 1773 - protein, 277 aa, Synthetic construct
MFHYVDVGPRDGTPVLFLHGNPTSSYVWRNIIPHVAPTHRCIAPDLIGMGKSDKPDLGYFFDDHVRFMDAFIEALGLEEVVLVIHDWGSALGFHWAKRFPERVKGIAFMEFIRPIPTWDEWPEFARETFQAFRTTDVGRKLIIDQNVFIEGTLPMGVVRPLTEVEMDHYREPFLNPVDREPLWRFPNELPIAGEPANIVALVEEYMDWLHQSPVPKLLFWGTPGVLIPPAEAARLAKSLPNCKAVDIGPGLNLLQEDNPDLIGSEIARWLSTLEISG

SEQ ID NO: 1774 - protein, 277 aa, Synthetic construct
MFHYVDVGPRDGTPVLFLHGNPTSSYVWRNIIPHVAPTHRCIAPDLIGMGKSDKPDLGYFFDDHVRFMDAFIEALGLEEVVLVIHDWGSALGFHWAKRQPERVKGIAFMEFIRPIPTWDEWPEFARETFQAFRTTDVGRKLIIDQNVFIEGTLPMGVVRPLTEVEMDHYREPFLNPVDREPLWRFPNELPIAGEPANIVALVEEYMDWLHQSPVPKLLFWGTPGVLIPPAEAARLAKSLPNCKAVDIGPGLNLLQEDNPDLIGSEIARWLSTLEISG

SEQ ID NO: 1775 - protein, 277 aa, Synthetic construct
MFHYVDVGPRDGTPVLFLHGNPTSSYVWRNIIPHVAPTHRCIAPDLIGMGKSDKPDLGYFFDDHVRFMDAFIEALGLEEVVLVIHDWGSALGFHWAKRSPERVKGIAFMEFIRPIPTWDEWPEFARETFQAFRTTDVGRKLIIDQNVFIEGTLPMGVVRPLTEVEMDHYREPFLNPVDREPLWRFPNELPIAGEPANIVALVEEYMDWLHQSPVPKLLFWGTPGVLIPPAEAARLAKSLPNCKAVDIGPGLNLLQEDNPDLIGSEIARWLSTLEISG

SEQ ID NO: 1776 - protein, 277 aa, Synthetic construct
MFHYVDVGPRDGTPVLFLHGNPTSSYVWRNIIPHVAPTHRCIAPDLIGMGKSDKPDLGYFFDDHVRFMDAFIEALGLEEVVLVIHDWGSALGFHWAKRNAERVKGIAFMEFIRPIPTWDEWPEFARETFQAFRTTDVGRKLIIDQNVFIEGTLPMGVVRPLTEVEMDHYREPFLNPVDREPLWRFPNELPIAGEPANIVALVEEYMDWLHQSPVPKLLFWGTPGVLIPPAEAARLAKSLPNCKAVDIGPGLNLLQEDNPDLIGSEIARWLSTLEISG

SEQ ID NO: 1777 - protein, 277 aa, Synthetic construct
MFHYVDVGPRDGTPVLFLHGNPTSSYVWRNIIPHVAPTHRCIAPDLIGMGKSDKPDLGYFFDDHVRFMDAFIEALGLEEVVLVIHDWGSALGFHWAKRNRERVKGIAFMEFIRPIPTWDEWPEFARETFQAFRTTDVGRKLIIDQNVFIEGTLPMGVVRPLTEVEMDHYREPFLNPVDREPLWRFPNELPIAGEPANIVALVEEYMDWLHQSPVPKLLFWGTPGVLIPPAEAARLAKSLPNCKAVDIGPGLNLLQEDNPDLIGSEIARWLSTLEISG

SEQ ID NO: 1778 - protein, 277 aa, Synthetic construct
MFHYVDVGPRDGTPVLFLHGNPTSSYVWRNIIPHVAPTHRCIAPDLIGMGKSDKPDLGYFFDDHVRFMDAFIEALGLEEVVLVIHDWGSALGFHWAKRNQERVKGIAFMEFIRPIPTWDEWPEFARETFQAFRTTDVGRKLIIDQNVFIEGTLPMGVVRPLTEVEMDHYREPFLNPVDREPLWRFPNELPIAGEPANIVALVEEYMDWLHQSPVPKLLFWGTPGVLIPPAEAARLAKSLPNCKAVDIGPGLNLLQEDNPDLIGSEIARWLSTLEISG

SEQ ID NO: 1779 - protein, 277 aa, Synthetic construct
MFHYVDVGPRDGTPVLFLHGNPTSSYVWRNIIPHVAPTHRCIAPDLIGMGKSDKPDLGYFFDDHVRFMDAFIEALGLEEVVLVIHDWGSALGFHWAKRNSERVKGIAFMEFIRPIPTWDEWPEFARETFQAFRTTDVGRKLIIDQNVFIEGTLPMGVVRPLTEVEMDHYREPFLNPVDREPLWRFPNELPIAGEPANIVALVEEYMDWLHQSPVPKLLFWGTPGVLIPPAEAARLAKSLPNCKAVDIGPGLNLLQEDNPDLIGSEIARWLSTLEISG

SEQ ID NO: 1780 - protein, 277 aa, Synthetic construct
MFHYVDVGPRDGTPVLFLHGNPTSSYVWRNIIPHVAPTHRCIAPDLIGMGKSDKPDLGYFFDDHVRFMDAFIEALGLEEVVLVIHDWGSALGFHWAKRNLERVKGIAFMEFIRPIPTWDEWPEFARETFQAFRTTDVGRKLIIDQNVFIEGTLPMGVVRPLTEVEMDHYREPFLNPVDREPLWRFPNELPIAGEPANIVALVEEYMDWLHQSPVPKLLFWGTPGVLIPPAEAARLAKSLPNCKAVDIGPGLNLLQEDNPDLIGSEIARWLSTLEISG

SEQ ID NO: 1781 - protein, 277 aa, Synthetic construct
MFHYVDVGPRDGTPVLFLHGNPTSSYVWRNIIPHVAPTHRCIAPDLIGMGKSDKPDLGYFFDDHVRFMDAFIEALGLEEVVLVIHDWGSALGFHWAKRNTERVKGIAFMEFIRPIPTWDEWPEFARETFQAFRTTDVGRKLIIDQNVFIEGTLPMGVVRPLTEVEMDHYREPFLNPVDREPLWRFPNELPIAGEPANIVALVEEYMDWLHQSPVPKLLFWGTPGVLIPPAEAARLAKSLPNCKAVDIGPGLNLLQEDNPDLIGSEIARWLSTLEISG

SEQ ID NO: 1782 - protein, 277 aa, Synthetic construct
MFHYVDVGPRDGTPVLFLHGNPTSSYVWRNIIPHVAPTHRCIAPDLIGMGKSDKPDLGYFFDDHVRFMDAFIEALGLEEVVLVIHDWGSALGFHWAKRNPDRVKGIAFMEFIRPIPTWDEWPEFARETFQAFRTTDVGRKLIIDQNVFIEGTLPMGVVRPLTEVEMDHYREPFLNPVDREPLWRFPNELPIAGEPANIVALVEEYMDWLHQSPVPKLLFWGTPGVLIPPAEAARLAKSLPNCKAVDIGPGLNLLQEDNPDLIGSEIARWLSTLEISG

SEQ ID NO: 1783 - protein, 277 aa, Synthetic construct
MFHYVDVGPRDGTPVLFLHGNPTSSYVWRNIIPHVAPTHRCIAPDLIGMGKSDKPDLGYFFDDHVRFMDAFIEALGLEEVVLVIHDWGSALGFHWAKRNPGRVKGIAFMEFIRPIPTWDEWPEFARETFQAFRTTDVGRKLIIDQNVFIEGTLPMGVVRPLTEVEMDHYREPFLNPVDREPLWRFPNELPIAGEPANIVALVEEYMDWLHQSPVPKLLFWGTPGVLIPPAEAARLAKSLPNCKAVDIGPGLNLLQEDNPDLIGSEIARWLSTLEISG

SEQ ID NO: 1784 - protein, 277 aa, Synthetic construct
MFHYVDVGPRDGTPVLFLHGNPTSSYVWRNIIPHVAPTHRCIAPDLIGMGKSDKPDLGYFFDDHVRFMDAFIEALGLEEVVLVIHDWGSALGFHWAKRNPARVKGIAFMEFIRPIPTWDEWPEFARETFQAFRTTDVGRKLIIDQNVFIEGTLPMGVVRPLTEVEMDHYREPFLNPVDREPLWRFPNELPIAGEPANIVALVEEYMDWLHQSPVPKLLFWGTPGVLIPPAEAARLAKSLPNCKAVDIGPGLNLLQEDNPDLIGSEIARWLSTLEISG

SEQ ID NO: 1785 - protein, 277 aa, Synthetic construct
MFHYVDVGPRDGTPVLFLHGNPTSSYVWRNIIPHVAPTHRCIAPDLIGMGKSDKPDLGYFFDDHVRFMDAFIEALGLEEVVLVIHDWGSALGFHWAKRNPQRVKGIAFMEFIRPIPTWDEWPEFARETFQAFRTTDVGRKLIIDQNVFIEGTLPMGVVRPLTEVEMDHYREPFLNPVDREPLWRFPNELPIAGEPANIVALVEEYMDWLHQSPVPKLLFWGTPGVLIPPAEAARLAKSLPNCKAVDIGPGLNLLQEDNPDLIGSEIARWLSTLEISG

SEQ ID NO: 1786 - protein, 277 aa, Synthetic construct
MFHYVDVGPRDGTPVLFLHGNPTSSYVWRNIIPHVAPTHRCIAPDLIGMGKSDKPDLGYFFDDHVRFMDAFIEALGLEEVVLVIHDWGSALGFHWAKRNPSRVKGIAFMEFIRPIPTWDEWPEFARETFQAFRTTDVGRKLIIDQNVFIEGTLPMGVVRPLTEVEMDHYREPFLNPVDREPLWRFPNELPIAGEPANIVALVEEYMDWLHQSPVPKLLFWGTPGVLIPPAEAARLAKSLPNCKAVDIGPGLNLLQEDNPDLIGSEIARWLSTLEISG

SEQ ID NO: 1787 - protein, 277 aa, Synthetic construct
MFHYVDVGPRDGTPVLFLHGNPTSSYVWRNIIPHVAPTHRCIAPDLIGMGKSDKPDLGYFFDDHVRFMDAFIEALGLEEVVLVIHDWGSALGFHWAKRNPNRVKGIAFMEFIRPIPTWDEWPEFARETFQAFRTTDVGRKLIIDQNVFIEGTLPMGVVRPLTEVEMDHYREPFLNPVDREPLWRFPNELPIAGEPANIVALVEEYMDWLHQSPVPKLLFWGTPGVLIPPAEAARLAKSLPNCKAVDIGPGLNLLQEDNPDLIGSEIARWLSTLEISG

SEQ ID NO: 1788 - protein, 277 aa, Synthetic construct
MFHYVDVGPRDGTPVLFLHGNPTSSYVWRNIIPHVAPTHRCIAPDLIGMGKSDKPDLGYFFDDHVRFMDAFIEALGLEEVVLVIHDWGSALGFHWAKRNPEKVKGIAFMEFIRPIPTWDEWPEFARETFQAFRTTDVGRKLIIDQNVFIEGTLPMGVVRPLTEVEMDHYREPFLNPVDREPLWRFPNELPIAGEPANIVALVEEYMDWLHQSPVPKLLFWGTPGVLIPPAEAARLAKSLPNCKAVDIGPGLNLLQEDNPDLIGSEIARWLSTLEISG

SEQ ID NO: 1789 - protein, 277 aa, Synthetic construct
MFHYVDVGPRDGTPVLFLHGNPTSSYVWRNIIPHVAPTHRCIAPDLIGMGKSDKPDLGYFFDDHVRFMDAFIEALGLEEVVLVIHDWGSALGFHWAKRNPEAVKGIAFMEFIRPIPTWDEWPEFARETFQAFRTTDVGRKLIIDQNVFIEGTLPMGVVRPLTEVEMDHYREPFLNPVDREPLWRFPNELPIAGEPANIVALVEEYMDWLHQSPVPKLLFWGTPGVLIPPAEAARLAKSLPNCKAVDIGPGLNLLQEDNPDLIGSEIARWLSTLEISG

SEQ ID NO: 1790 - protein, 277 aa, Synthetic construct
MFHYVDVGPRDGTPVLFLHGNPTSSYVWRNIIPHVAPTHRCIAPDLIGMGKSDKPDLGYFFDDHVRFMDAFIEALGLEEVVLVIHDWGSALGFHWAKRNPELVKGIAFMEFIRPIPTWDEWPEFARETFQAFRTTDVGRKLIIDQNVFIEGTLPMGVVRPLTEVEMDHYREPFLNPVDREPLWRFPNELPIAGEPANIVALVEEYMDWLHQSPVPKLLFWGTPGVLIPPAEAARLAKSLPNCKAVDIGPGLNLLQEDNPDLIGSEIARWLSTLEISG

SEQ ID NO: 1791 - protein, 277 aa, Synthetic construct
MFHYVDVGPRDGTPVLFLHGNPTSSYVWRNIIPHVAPTHRCIAPDLIGMGKSDKPDLGYFFDDHVRFMDAFIEALGLEEVVLVIHDWGSALGFHWAKRNPEQVKGIAFMEFIRPIPTWDEWPEFARETFQAFRTTDVGRKLIIDQNVFIEGTLPMGVVRPLTEVEMDHYREPFLNPVDREPLWRFPNELPIAGEPANIVALVEEYMDWLHQSPVPKLLFWGTPGVLIPPAEAARLAKSLPNCKAVDIGPGLNLLQEDNPDLIGSEIARWLSTLEISG

SEQ ID NO: 1792 - protein, 277 aa, Synthetic construct
MFHYVDVGPRDGTPVLFLHGNPTSSYVWRNIIPHVAPTHRCIAPDLIGMGKSDKPDLGYFFDDHVRFMDAFIEALGLEEVVLVIHDWGSALGFHWAKRNPENVKGIAFMEFIRPIPTWDEWPEFARETFQAFRTTDVGRKLIIDQNVFIEGTLPMGVVRPLTEVEMDHYREPFLNPVDREPLWRFPNELPIAGEPANIVALVEEYMDWLHQSPVPKLLFWGTPGVLIPPAEAARLAKSLPNCKAVDIGPGLNLLQEDNPDLIGSEIARWLSTLEISG

SEQ ID NO: 1793 - protein, 277 aa, Synthetic construct
MFHYVDVGPRDGTPVLFLHGNPTSSYVWRNIIPHVAPTHRCIAPDLIGMGKSDKPDLGYFFDDHVRFMDAFIEALGLEEVVLVIHDWGSALGFHWAKRNPESVKGIAFMEFIRPIPTWDEWPEFARETFQAFRTTDVGRKLIIDQNVFIEGTLPMGVVRPLTEVEMDHYREPFLNPVDREPLWRFPNELPIAGEPANIVALVEEYMDWLHQSPVPKLLFWGTPGVLIPPAEAARLAKSLPNCKAVDIGPGLNLLQEDNPDLIGSEIARWLSTLEISG

SEQ ID NO: 1794 - protein, 277 aa, Synthetic construct
MFHYVDVGPRDGTPVLFLHGNPTSSYVWRNIIPHVAPTHRCIAPDLIGMGKSDKPDLGYFFDDHVRFMDAFIEALGLEEVVLVIHDWGSALGFHWAKRNPERIKGIAFMEFIRPIPTWDEWPEFARETFQAFRTTDVGRKLIIDQNVFIEGTLPMGVVRPLTEVEMDHYREPFLNPVDREPLWRFPNELPIAGEPANIVALVEEYMDWLHQSPVPKLLFWGTPGVLIPPAEAARLAKSLPNCKAVDIGPGLNLLQEDNPDLIGSEIARWLSTLEISG

SEQ ID NO: 1795 - protein, 277 aa, Synthetic construct
MFHYVDVGPRDGTPVLFLHGNPTSSYVWRNIIPHVAPTHRCIAPDLIGMGKSDKPDLGYFFDDHVRFMDAFIEALGLEEVVLVIHDWGSALGFHWAKRNPERLKGIAFMEFIRPIPTWDEWPEFARETFQAFRTTDVGRKLIIDQNVFIEGTLPMGVVRPLTEVEMDHYREPFLNPVDREPLWRFPNELPIAGEPANIVALVEEYMDWLHQSPVPKLLFWGTPGVLIPPAEAARLAKSLPNCKAVDIGPGLNLLQEDNPDLIGSEIARWLSTLEISG

SEQ ID NO: 1796 - protein, 277 aa, Synthetic construct
MFHYVDVGPRDGTPVLFLHGNPTSSYVWRNIIPHVAPTHRCIAPDLIGMGKSDKPDLGYFFDDHVRFMDAFIEALGLEEVVLVIHDWGSALGFHWAKRNPERTKGIAFMEFIRPIPTWDEWPEFARETFQAFRTTDVGRKLIIDQNVFIEGTLPMGVVRPLTEVEMDHYREPFLNPVDREPLWRFPNELPIAGEPANIVALVEEYMDWLHQSPVPKLLFWGTPGVLIPPAEAARLAKSLPNCKAVDIGPGLNLLQEDNPDLIGSEIARWLSTLEISG

SEQ ID NO: 1797 - protein, 277 aa, Synthetic construct
MFHYVDVGPRDGTPVLFLHGNPTSSYVWRNIIPHVAPTHRCIAPDLIGMGKSDKPDLGYFFDDHVRFMDAFIEALGLEEVVLVIHDWGSALGFHWAKRNPERMKGIAFMEFIRPIPTWDEWPEFARETFQAFRTTDVGRKLIIDQNVFIEGTLPMGVVRPLTEVEMDHYREPFLNPVDREPLWRFPNELPIAGEPANIVALVEEYMDWLHQSPVPKLLFWGTPGVLIPPAEAARLAKSLPNCKAVDIGPGLNLLQEDNPDLIGSEIARWLSTLEISG

SEQ ID NO: 1798 - protein, 277 aa, Synthetic construct
MFHYVDVGPRDGTPVLFLHGNPTSSYVWRNIIPHVAPTHRCIAPDLIGMGKSDKPDLGYFFDDHVRFMDAFIEALGLEEVVLVIHDWGSALGFHWAKRNPERAKGIAFMEFIRPIPTWDEWPEFARETFQAFRTTDVGRKLIIDQNVFIEGTLPMGVVRPLTEVEMDHYREPFLNPVDREPLWRFPNELPIAGEPANIVALVEEYMDWLHQSPVPKLLFWGTPGVLIPPAEAARLAKSLPNCKAVDIGPGLNLLQEDNPDLIGSEIARWLSTLEISG

SEQ ID NO: 1799 - protein, 277 aa, Synthetic construct
MFHYVDVGPRDGTPVLFLHGNPTSSYVWRNIIPHVAPTHRCIAPDLIGMGKSDKPDLGYFFDDHVRFMDAFIEALGLEEVVLVIHDWGSALGFHWAKRNPERFKGIAFMEFIRPIPTWDEWPEFARETFQAFRTTDVGRKLIIDQNVFIEGTLPMGVVRPLTEVEMDHYREPFLNPVDREPLWRFPNELPIAGEPANIVALVEEYMDWLHQSPVPKLLFWGTPGVLIPPAEAARLAKSLPNCKAVDIGPGLNLLQEDNPDLIGSEIARWLSTLEISG

SEQ ID NO: 1800 - protein, 277 aa, Synthetic construct
MFHYVDVGPRDGTPVLFLHGNPTSSYVWRNIIPHVAPTHRCIAPDLIGMGKSDKPDLGYFFDDHVRFMDAFIEALGLEEVVLVIHDWGSALGFHWAKRNPERVRGIAFMEFIRPIPTWDEWPEFARETFQAFRTTDVGRKLIIDQNVFIEGTLPMGVVRPLTEVEMDHYREPFLNPVDREPLWRFPNELPIAGEPANIVALVEEYMDWLHQSPVPKLLFWGTPGVLIPPAEAARLAKSLPNCKAVDIGPGLNLLQEDNPDLIGSEIARWLSTLEISG

SEQ ID NO: 1801 - protein, 277 aa, Synthetic construct
MFHYVDVGPRDGTPVLFLHGNPTSSYVWRNIIPHVAPTHRCIAPDLIGMGKSDKPDLGYFFDDHVRFMDAFIEALGLEEVVLVIHDWGSALGFHWAKRNPERVAGIAFMEFIRPIPTWDEWPEFARETFQAFRTTDVGRKLIIDQNVFIEGTLPMGVVRPLTEVEMDHYREPFLNPVDREPLWRFPNELPIAGEPANIVALVEEYMDWLHQSPVPKLLFWGTPGVLIPPAEAARLAKSLPNCKAVDIGPGLNLLQEDNPDLIGSEIARWLSTLEISG

SEQ ID NO: 1802 - protein, 277 aa, Synthetic construct
MFHYVDVGPRDGTPVLFLHGNPTSSYVWRNIIPHVAPTHRCIAPDLIGMGKSDKPDLGYFFDDHVRFMDAFIEALGLEEVVLVIHDWGSALGFHWAKRNPERVSGIAFMEFIRPIPTWDEWPEFARETFQAFRTTDVGRKLIIDQNVFIEGTLPMGVVRPLTEVEMDHYREPFLNPVDREPLWRFPNELPIAGEPANIVALVEEYMDWLHQSPVPKLLFWGTPGVLIPPAEAARLAKSLPNCKAVDIGPGLNLLQEDNPDLIGSEIARWLSTLEISG

SEQ ID NO: 1803 - protein, 277 aa, Synthetic construct
MFHYVDVGPRDGTPVLFLHGNPTSSYVWRNIIPHVAPTHRCIAPDLIGMGKSDKPDLGYFFDDHVRFMDAFIEALGLEEVVLVIHDWGSALGFHWAKRNPERVLGIAFMEFIRPIPTWDEWPEFARETFQAFRTTDVGRKLIIDQNVFIEGTLPMGVVRPLTEVEMDHYREPFLNPVDREPLWRFPNELPIAGEPANIVALVEEYMDWLHQSPVPKLLFWGTPGVLIPPAEAARLAKSLPNCKAVDIGPGLNLLQEDNPDLIGSEIARWLSTLEISG

SEQ ID NO: 1804 - protein, 277 aa, Synthetic construct
MFHYVDVGPRDGTPVLFLHGNPTSSYVWRNIIPHVAPTHRCIAPDLIGMGKSDKPDLGYFFDDHVRFMDAFIEALGLEEVVLVIHDWGSALGFHWAKRNPERVTGIAFMEFIRPIPTWDEWPEFARETFQAFRTTDVGRKLIIDQNVFIEGTLPMGVVRPLTEVEMDHYREPFLNPVDREPLWRFPNELPIAGEPANIVALVEEYMDWLHQSPVPKLLFWGTPGVLIPPAEAARLAKSLPNCKAVDIGPGLNLLQEDNPDLIGSEIARWLSTLEISG

SEQ ID NO: 1805 - protein, 277 aa, Synthetic construct
MFHYVDVGPRDGTPVLFLHGNPTSSYVWRNIIPHVAPTHRCIAPDLIGMGKSDKPDLGYFFDDHVRFMDAFIEALGLEEVVLVIHDWGSALGFHWAKRNPERVVGIAFMEFIRPIPTWDEWPEFARETFQAFRTTDVGRKLIIDQNVFIEGTLPMGVVRPLTEVEMDHYREPFLNPVDREPLWRFPNELPIAGEPANIVALVEEYMDWLHQSPVPKLLFWGTPGVLIPPAEAARLAKSLPNCKAVDIGPGLNLLQEDNPDLIGSEIARWLSTLEISG

SEQ ID NO: 1806 - protein, 277 aa, Synthetic construct
MFHYVDVGPRDGTPVLFLHGNPTSSYVWRNIIPHVAPTHRCIAPDLIGMGKSDKPDLGYFFDDHVRFMDAFIEALGLEEVVLVIHDWGSALGFHWAKRNPERVKAIAFMEFIRPIPTWDEWPEFARETFQAFRTTDVGRKLIIDQNVFIEGTLPMGVVRPLTEVEMDHYREPFLNPVDREPLWRFPNELPIAGEPANIVALVEEYMDWLHQSPVPKLLFWGTPGVLIPPAEAARLAKSLPNCKAVDIGPGLNLLQEDNPDLIGSEIARWLSTLEISG

SEQ ID NO: 1807 - protein, 277 aa, Synthetic construct
MFHYVDVGPRDGTPVLFLHGNPTSSYVWRNIIPHVAPTHRCIAPDLIGMGKSDKPDLGYFFDDHVRFMDAFIEALGLEEVVLVIHDWGSALGFHWAKRNPERVKSIAFMEFIRPIPTWDEWPEFARETFQAFRTTDVGRKLIIDQNVFIEGTLPMGVVRPLTEVEMDHYREPFLNPVDREPLWRFPNELPIAGEPANIVALVEEYMDWLHQSPVPKLLFWGTPGVLIPPAEAARLAKSLPNCKAVDIGPGLNLLQEDNPDLIGSEIARWLSTLEISG

SEQ ID NO: 1808 - protein, 277 aa, Synthetic construct
MFHYVDVGPRDGTPVLFLHGNPTSSYVWRNIIPHVAPTHRCIAPDLIGMGKSDKPDLGYFFDDHVRFMDAFIEALGLEEVVLVIHDWGSALGFHWAKRNPERVKRIAFMEFIRPIPTWDEWPEFARETFQAFRTTDVGRKLIIDQNVFIEGTLPMGVVRPLTEVEMDHYREPFLNPVDREPLWRFPNELPIAGEPANIVALVEEYMDWLHQSPVPKLLFWGTPGVLIPPAEAARLAKSLPNCKAVDIGPGLNLLQEDNPDLIGSEIARWLSTLEISG

SEQ ID NO: 1809 - protein, 277 aa, Synthetic construct
MFHYVDVGPRDGTPVLFLHGNPTSSYVWRNIIPHVAPTHRCIAPDLIGMGKSDKPDLGYFFDDHVRFMDAFIEALGLEEVVLVIHDWGSALGFHWAKRNPERVKCIAFMEFIRPIPTWDEWPEFARETFQAFRTTDVGRKLIIDQNVFIEGTLPMGVVRPLTEVEMDHYREPFLNPVDREPLWRFPNELPIAGEPANIVALVEEYMDWLHQSPVPKLLFWGTPGVLIPPAEAARLAKSLPNCKAVDIGPGLNLLQEDNPDLIGSEIARWLSTLEISG

SEQ ID NO: 1810 - protein, 277 aa, Synthetic construct
MFHYVDVGPRDGTPVLFLHGNPTSSYVWRNIIPHVAPTHRCIAPDLIGMGKSDKPDLGYFFDDHVRFMDAFIEALGLEEVVLVIHDWGSALGFHWAKRNPERVKTIAFMEFIRPIPTWDEWPEFARETFQAFRTTDVGRKLIIDQNVFIEGTLPMGVVRPLTEVEMDHYREPFLNPVDREPLWRFPNELPIAGEPANIVALVEEYMDWLHQSPVPKLLFWGTPGVLIPPAEAARLAKSLPNCKAVDIGPGLNLLQEDNPDLIGSEIARWLSTLEISG

SEQ ID NO: 1811 - protein, 277 aa, Synthetic construct
MFHYVDVGPRDGTPVLFLHGNPTSSYVWRNIIPHVAPTHRCIAPDLIGMGKSDKPDLGYFFDDHVRFMDAFIEALGLEEVVLVIHDWGSALGFHWAKRNPERVKVIAFMEFIRPIPTWDEWPEFARETFQAFRTTDVGRKLIIDQNVFIEGTLPMGVVRPLTEVEMDHYREPFLNPVDREPLWRFPNELPIAGEPANIVALVEEYMDWLHQSPVPKLLFWGTPGVLIPPAEAARLAKSLPNCKAVDIGPGLNLLQEDNPDLIGSEIARWLSTLEISG

SEQ ID NO: 1812 - protein, 277 aa, Synthetic construct
MFHYVDVGPRDGTPVLFLHGNPTSSYVWRNIIPHVAPTHRCIAPDLIGMGKSDKPDLGYFFDDHVRFMDAFIEALGLEEVVLVIHDWGSALGFHWAKRNPERVKGLAFMEFIRPIPTWDEWPEFARETFQAFRTTDVGRKLIIDQNVFIEGTLPMGVVRPLTEVEMDHYREPFLNPVDREPLWRFPNELPIAGEPANIVALVEEYMDWLHQSPVPKLLFWGTPGVLIPPAEAARLAKSLPNCKAVDIGPGLNLLQEDNPDLIGSEIARWLSTLEISG

SEQ ID NO: 1813 - protein, 277 aa, Synthetic construct
MFHYVDVGPRDGTPVLFLHGNPTSSYVWRNIIPHVAPTHRCIAPDLIGMGKSDKPDLGYFFDDHVRFMDAFIEALGLEEVVLVIHDWGSALGFHWAKRNPERVKGVAFMEFIRPIPTWDEWPEFARETFQAFRTTDVGRKLIIDQNVFIEGTLPMGVVRPLTEVEMDHYREPFLNPVDREPLWRFPNELPIAGEPANIVALVEEYMDWLHQSPVPKLLFWGTPGVLIPPAEAARLAKSLPNCKAVDIGPGLNLLQEDNPDLIGSEIARWLSTLEISG

SEQ ID NO: 1814 - protein, 277 aa, Synthetic construct
MFHYVDVGPRDGTPVLFLHGNPTSSYVWRNIIPHVAPTHRCIAPDLIGMGKSDKPDLGYFFDDHVRFMDAFIEALGLEEVVLVIHDWGSALGFHWAKRNPERVKGMAFMEFIRPIPTWDEWPEFARETFQAFRTTDVGRKLIIDQNVFIEGTLPMGVVRPLTEVEMDHYREPFLNPVDREPLWRFPNELPIAGEPANIVALVEEYMDWLHQSPVPKLLFWGTPGVLIPPAEAARLAKSLPNCKAVDIGPGLNLLQEDNPDLIGSEIARWLSTLEISG

SEQ ID NO: 1815 - protein, 277 aa, Synthetic construct
MFHYVDVGPRDGTPVLFLHGNPTSSYVWRNIIPHVAPTHRCIAPDLIGMGKSDKPDLGYFFDDHVRFMDAFIEALGLEEVVLVIHDWGSALGFHWAKRNPERVKGFAFMEFIRPIPTWDEWPEFARETFQAFRTTDVGRKLIIDQNVFIEGTLPMGVVRPLTEVEMDHYREPFLNPVDREPLWRFPNELPIAGEPANIVALVEEYMDWLHQSPVPKLLFWGTPGVLIPPAEAARLAKSLPNCKAVDIGPGLNLLQEDNPDLIGSEIARWLSTLEISG

SEQ ID NO: 1816 - protein, 277 aa, Synthetic construct
MFHYVDVGPRDGTPVLFLHGNPTSSYVWRNIIPHVAPTHRCIAPDLIGMGKSDKPDLGYFFDDHVRFMDAFIEALGLEEVVLVIHDWGSALGFHWAKRNPERVKGAAFMEFIRPIPTWDEWPEFARETFQAFRTTDVGRKLIIDQNVFIEGTLPMGVVRPLTEVEMDHYREPFLNPVDREPLWRFPNELPIAGEPANIVALVEEYMDWLHQSPVPKLLFWGTPGVLIPPAEAARLAKSLPNCKAVDIGPGLNLLQEDNPDLIGSEIARWLSTLEISG

SEQ ID NO: 1817 - protein, 277 aa, Synthetic construct
MFHYVDVGPRDGTPVLFLHGNPTSSYVWRNIIPHVAPTHRCIAPDLIGMGKSDKPDLGYFFDDHVRFMDAFIEALGLEEVVLVIHDWGSALGFHWAKRNPERVKGYAFMEFIRPIPTWDEWPEFARETFQAFRTTDVGRKLIIDQNVFIEGTLPMGVVRPLTEVEMDHYREPFLNPVDREPLWRFPNELPIAGEPANIVALVEEYMDWLHQSPVPKLLFWGTPGVLIPPAEAARLAKSLPNCKAVDIGPGLNLLQEDNPDLIGSEIARWLSTLEISG

SEQ ID NO: 1818 - protein, 277 aa, Synthetic construct
MFHYVDVGPRDGTPVLFLHGNPTSSYVWRNIIPHVAPTHRCIAPDLIGMGKSDKPDLGYFFDDHVRFMDAFIEALGLEEVVLVIHDWGSALGFHWAKRNPERVKGIVFMEFIRPIPTWDEWPEFARETFQAFRTTDVGRKLIIDQNVFIEGTLPMGVVRPLTEVEMDHYREPFLNPVDREPLWRFPNELPIAGEPANIVALVEEYMDWLHQSPVPKLLFWGTPGVLIPPAEAARLAKSLPNCKAVDIGPGLNLLQEDNPDLIGSEIARWLSTLEISG

SEQ ID NO: 1819 - protein, 277 aa, Synthetic construct
MFHYVDVGPRDGTPVLFLHGNPTSSYVWRNIIPHVAPTHRCIAPDLIGMGKSDKPDLGYFFDDHVRFMDAFIEALGLEEVVLVIHDWGSALGFHWAKRNPERVKGICFMEFIRPIPTWDEWPEFARETFQAFRTTDVGRKLIIDQNVFIEGTLPMGVVRPLTEVEMDHYREPFLNPVDREPLWRFPNELPIAGEPANIVALVEEYMDWLHQSPVPKLLFWGTPGVLIPPAEAARLAKSLPNCKAVDIGPGLNLLQEDNPDLIGSEIARWLSTLEISG

SEQ ID NO: 1820 - protein, 277 aa, Synthetic construct
MFHYVDVGPRDGTPVLFLHGNPTSSYVWRNIIPHVAPTHRCIAPDLIGMGKSDKPDLGYFFDDHVRFMDAFIEALGLEEVVLVIHDWGSALGFHWAKRNPERVKGIGFMEFIRPIPTWDEWPEFARETFQAFRTTDVGRKLIIDQNVFIEGTLPMGVVRPLTEVEMDHYREPFLNPVDREPLWRFPNELPIAGEPANIVALVEEYMDWLHQSPVPKLLFWGTPGVLIPPAEAARLAKSLPNCKAVDIGPGLNLLQEDNPDLIGSEIARWLSTLEISG

SEQ ID NO: 1821 - protein, 277 aa, Synthetic construct
MFHYVDVGPRDGTPVLFLHGNPTSSYVWRNIIPHVAPTHRCIAPDLIGMGKSDKPDLGYFFDDHVRFMDAFIEALGLEEVVLVIHDWGSALGFHWAKRNPERVKGIIFMEFIRPIPTWDEWPEFARETFQAFRTTDVGRKLIIDQNVFIEGTLPMGVVRPLTEVEMDHYREPFLNPVDREPLWRFPNELPIAGEPANIVALVEEYMDWLHQSPVPKLLFWGTPGVLIPPAEAARLAKSLPNCKAVDIGPGLNLLQEDNPDLIGSEIARWLSTLEISG

SEQ ID NO: 1822 - protein, 277 aa, Synthetic construct
MFHYVDVGPRDGTPVLFLHGNPTSSYVWRNIIPHVAPTHRCIAPDLIGMGKSDKPDLGYFFDDHVRFMDAFIEALGLEEVVLVIHDWGSALGFHWAKRNPERVKGISFMEFIRPIPTWDEWPEFARETFQAFRTTDVGRKLIIDQNVFIEGTLPMGVVRPLTEVEMDHYREPFLNPVDREPLWRFPNELPIAGEPANIVALVEEYMDWLHQSPVPKLLFWGTPGVLIPPAEAARLAKSLPNCKAVDIGPGLNLLQEDNPDLIGSEIARWLSTLEISG

SEQ ID NO: 1823 - protein, 277 aa, Synthetic construct
MFHYVDVGPRDGTPVLFLHGNPTSSYVWRNIIPHVAPTHRCIAPDLIGMGKSDKPDLGYFFDDHVRFMDAFIEALGLEEVVLVIHDWGSALGFHWAKRNPERVKGITFMEFIRPIPTWDEWPEFARETFQAFRTTDVGRKLIIDQNVFIEGTLPMGVVRPLTEVEMDHYREPFLNPVDREPLWRFPNELPIAGEPANIVALVEEYMDWLHQSPVPKLLFWGTPGVLIPPAEAARLAKSLPNCKAVDIGPGLNLLQEDNPDLIGSEIARWLSTLEISG

SEQ ID NO: 1824 - protein, 277 aa, Synthetic construct
MFHYVDVGPRDGTPVLFLHGNPTSSYVWRNIIPHVAPTHRCIAPDLIGMGKSDKPDLGYFFDDHVRFMDAFIEALGLEEVVLVIHDWGSALGFHWAKRNPERVKGIAYMEFIRPIPTWDEWPEFARETFQAFRTTDVGRKLIIDQNVFIEGTLPMGVVRPLTEVEMDHYREPFLNPVDREPLWRFPNELPIAGEPANIVALVEEYMDWLHQSPVPKLLFWGTPGVLIPPAEAARLAKSLPNCKAVDIGPGLNLLQEDNPDLIGSEIARWLSTLEISG

SEQ ID NO: 1825 - protein, 277 aa, Synthetic construct
MFHYVDVGPRDGTPVLFLHGNPTSSYVWRNIIPHVAPTHRCIAPDLIGMGKSDKPDLGYFFDDHVRFMDAFIEALGLEEVVLVIHDWGSALGFHWAKRNPERVKGIALMEFIRPIPTWDEWPEFARETFQAFRTTDVGRKLIIDQNVFIEGTLPMGVVRPLTEVEMDHYREPFLNPVDREPLWRFPNELPIAGEPANIVALVEEYMDWLHQSPVPKLLFWGTPGVLIPPAEAARLAKSLPNCKAVDIGPGLNLLQEDNPDLIGSEIARWLSTLEISG

SEQ ID NO: 1826 - protein, 277 aa, Synthetic construct
MFHYVDVGPRDGTPVLFLHGNPTSSYVWRNIIPHVAPTHRCIAPDLIGMGKSDKPDLGYFFDDHVRFMDAFIEALGLEEVVLVIHDWGSALGFHWAKRNPERVKGIAIMEFIRPIPTWDEWPEFARETFQAFRTTDVGRKLIIDQNVFIEGTLPMGVVRPLTEVEMDHYREPFLNPVDREPLWRFPNELPIAGEPANIVALVEEYMDWLHQSPVPKLLFWGTPGVLIPPAEAARLAKSLPNCKAVDIGPGLNLLQEDNPDLIGSEIARWLSTLEISG

SEQ ID NO: 1827 - protein, 277 aa, Synthetic construct
MFHYVDVGPRDGTPVLFLHGNPTSSYVWRNIIPHVAPTHRCIAPDLIGMGKSDKPDLGYFFDDHVRFMDAFIEALGLEEVVLVIHDWGSALGFHWAKRNPERVKGIAMMEFIRPIPTWDEWPEFARETFQAFRTTDVGRKLIIDQNVFIEGTLPMGVVRPLTEVEMDHYREPFLNPVDREPLWRFPNELPIAGEPANIVALVEEYMDWLHQSPVPKLLFWGTPGVLIPPAEAARLAKSLPNCKAVDIGPGLNLLQEDNPDLIGSEIARWLSTLEISG

SEQ ID NO: 1828 - protein, 277 aa, Synthetic construct
MFHYVDVGPRDGTPVLFLHGNPTSSYVWRNIIPHVAPTHRCIAPDLIGMGKSDKPDLGYFFDDHVRFMDAFIEALGLEEVVLVIHDWGSALGFHWAKRNPERVKGIAVMEFIRPIPTWDEWPEFARETFQAFRTTDVGRKLIIDQNVFIEGTLPMGVVRPLTEVEMDHYREPFLNPVDREPLWRFPNELPIAGEPANIVALVEEYMDWLHQSPVPKLLFWGTPGVLIPPAEAARLAKSLPNCKAVDIGPGLNLLQEDNPDLIGSEIARWLSTLEISG

SEQ ID NO: 1829 - protein, 277 aa, Synthetic construct
MFHYVDVGPRDGTPVLFLHGNPTSSYVWRNIIPHVAPTHRCIAPDLIGMGKSDKPDLGYFFDDHVRFMDAFIEALGLEEVVLVIHDWGSALGFHWAKRNPERVKGIAHMEFIRPIPTWDEWPEFARETFQAFRTTDVGRKLIIDQNVFIEGTLPMGVVRPLTEVEMDHYREPFLNPVDREPLWRFPNELPIAGEPANIVALVEEYMDWLHQSPVPKLLFWGTPGVLIPPAEAARLAKSLPNCKAVDIGPGLNLLQEDNPDLIGSEIARWLSTLEISG

SEQ ID NO: 1830 - protein, 277 aa, Synthetic construct
MFHYVDVGPRDGTPVLFLHGNPTSSYVWRNIIPHVAPTHRCIAPDLIGMGKSDKPDLGYFFDDHVRFMDAFIEALGLEEVVLVIHDWGSALGFHWAKRNPERVKGIAFLEFIRPIPTWDEWPEFARETFQAFRTTDVGRKLIIDQNVFIEGTLPMGVVRPLTEVEMDHYREPFLNPVDREPLWRFPNELPIAGEPANIVALVEEYMDWLHQSPVPKLLFWGTPGVLIPPAEAARLAKSLPNCKAVDIGPGLNLLQEDNPDLIGSEIARWLSTLEISG

SEQ ID NO: 1831 - protein, 277 aa, Synthetic construct
MFHYVDVGPRDGTPVLFLHGNPTSSYVWRNIIPHVAPTHRCIAPDLIGMGKSDKPDLGYFFDDHVRFMDAFIEALGLEEVVLVIHDWGSALGFHWAKRNPERVKGIAFFEFIRPIPTWDEWPEFARETFQAFRTTDVGRKLIIDQNVFIEGTLPMGVVRPLTEVEMDHYREPFLNPVDREPLWRFPNELPIAGEPANIVALVEEYMDWLHQSPVPKLLFWGTPGVLIPPAEAARLAKSLPNCKAVDIGPGLNLLQEDNPDLIGSEIARWLSTLEISG

SEQ ID NO: 1832 - protein, 277 aa, Synthetic construct
MFHYVDVGPRDGTPVLFLHGNPTSSYVWRNIIPHVAPTHRCIAPDLIGMGKSDKPDLGYFFDDHVRFMDAFIEALGLEEVVLVIHDWGSALGFHWAKRNPERVKGIAFTEFIRPIPTWDEWPEFARETFQAFRTTDVGRKLIIDQNVFIEGTLPMGVVRPLTEVEMDHYREPFLNPVDREPLWRFPNELPIAGEPANIVALVEEYMDWLHQSPVPKLLFWGTPGVLIPPAEAARLAKSLPNCKAVDIGPGLNLLQEDNPDLIGSEIARWLSTLEISG

SEQ ID NO: 1833 - protein, 277 aa, Synthetic construct
MFHYVDVGPRDGTPVLFLHGNPTSSYVWRNIIPHVAPTHRCIAPDLIGMGKSDKPDLGYFFDDHVRFMDAFIEALGLEEVVLVIHDWGSALGFHWAKRNPERVKGIAFAEFIRPIPTWDEWPEFARETFQAFRTTDVGRKLIIDQNVFIEGTLPMGVVRPLTEVEMDHYREPFLNPVDREPLWRFPNELPIAGEPANIVALVEEYMDWLHQSPVPKLLFWGTPGVLIPPAEAARLAKSLPNCKAVDIGPGLNLLQEDNPDLIGSEIARWLSTLEISG

SEQ ID NO: 1834 - protein, 277 aa, Synthetic construct
MFHYVDVGPRDGTPVLFLHGNPTSSYVWRNIIPHVAPTHRCIAPDLIGMGKSDKPDLGYFFDDHVRFMDAFIEALGLEEVVLVIHDWGSALGFHWAKRNPERVKGIAFIEFIRPIPTWDEWPEFARETFQAFRTTDVGRKLIIDQNVFIEGTLPMGVVRPLTEVEMDHYREPFLNPVDREPLWRFPNELPIAGEPANIVALVEEYMDWLHQSPVPKLLFWGTPGVLIPPAEAARLAKSLPNCKAVDIGPGLNLLQEDNPDLIGSEIARWLSTLEISG

SEQ ID NO: 1835 - protein, 277 aa, Synthetic construct
MFHYVDVGPRDGTPVLFLHGNPTSSYVWRNIIPHVAPTHRCIAPDLIGMGKSDKPDLGYFFDDHVRFMDAFIEALGLEEVVLVIHDWGSALGFHWAKRNPERVKGIAFSEFIRPIPTWDEWPEFARETFQAFRTTDVGRKLIIDQNVFIEGTLPMGVVRPLTEVEMDHYREPFLNPVDREPLWRFPNELPIAGEPANIVALVEEYMDWLHQSPVPKLLFWGTPGVLIPPAEAARLAKSLPNCKAVDIGPGLNLLQEDNPDLIGSEIARWLSTLEISG

SEQ ID NO: 1836 - protein, 277 aa, Synthetic construct
MFHYVDVGPRDGTPVLFLHGNPTSSYVWRNIIPHVAPTHRCIAPDLIGMGKSDKPDLGYFFDDHVRFMDAFIEALGLEEVVLVIHDWGSALGFHWAKRNPERVKGIAFMDFIRPIPTWDEWPEFARETFQAFRTTDVGRKLIIDQNVFIEGTLPMGVVRPLTEVEMDHYREPFLNPVDREPLWRFPNELPIAGEPANIVALVEEYMDWLHQSPVPKLLFWGTPGVLIPPAEAARLAKSLPNCKAVDIGPGLNLLQEDNPDLIGSEIARWLSTLEISG

SEQ ID NO: 1837 - protein, 277 aa, Synthetic construct
MFHYVDVGPRDGTPVLFLHGNPTSSYVWRNIIPHVAPTHRCIAPDLIGMGKSDKPDLGYFFDDHVRFMDAFIEALGLEEVVLVIHDWGSALGFHWAKRNPERVKGIAFMQFIRPIPTWDEWPEFARETFQAFRTTDVGRKLIIDQNVFIEGTLPMGVVRPLTEVEMDHYREPFLNPVDREPLWRFPNELPIAGEPANIVALVEEYMDWLHQSPVPKLLFWGTPGVLIPPAEAARLAKSLPNCKAVDIGPGLNLLQEDNPDLIGSEIARWLSTLEISG

SEQ ID NO: 1838 - protein, 277 aa, Synthetic construct
MFHYVDVGPRDGTPVLFLHGNPTSSYVWRNIIPHVAPTHRCIAPDLIGMGKSDKPDLGYFFDDHVRFMDAFIEALGLEEVVLVIHDWGSALGFHWAKRNPERVKGIAFMNFIRPIPTWDEWPEFARETFQAFRTTDVGRKLIIDQNVFIEGTLPMGVVRPLTEVEMDHYREPFLNPVDREPLWRFPNELPIAGEPANIVALVEEYMDWLHQSPVPKLLFWGTPGVLIPPAEAARLAKSLPNCKAVDIGPGLNLLQEDNPDLIGSEIARWLSTLEISG

SEQ ID NO: 1839 - protein, 277 aa, Synthetic construct
MFHYVDVGPRDGTPVLFLHGNPTSSYVWRNIIPHVAPTHRCIAPDLIGMGKSDKPDLGYFFDDHVRFMDAFIEALGLEEVVLVIHDWGSALGFHWAKRNPERVKGIAFMGFIRPIPTWDEWPEFARETFQAFRTTDVGRKLIIDQNVFIEGTLPMGVVRPLTEVEMDHYREPFLNPVDREPLWRFPNELPIAGEPANIVALVEEYMDWLHQSPVPKLLFWGTPGVLIPPAEAARLAKSLPNCKAVDIGPGLNLLQEDNPDLIGSEIARWLSTLEISG

SEQ ID NO: 1840 - protein, 277 aa, Synthetic construct
MFHYVDVGPRDGTPVLFLHGNPTSSYVWRNIIPHVAPTHRCIAPDLIGMGKSDKPDLGYFFDDHVRFMDAFIEALGLEEVVLVIHDWGSALGFHWAKRNPERVKGIAFMSFIRPIPTWDEWPEFARETFQAFRTTDVGRKLIIDQNVFIEGTLPMGVVRPLTEVEMDHYREPFLNPVDREPLWRFPNELPIAGEPANIVALVEEYMDWLHQSPVPKLLFWGTPGVLIPPAEAARLAKSLPNCKAVDIGPGLNLLQEDNPDLIGSEIARWLSTLEISG

SEQ ID NO: 1841 - protein, 277 aa, Synthetic construct
MFHYVDVGPRDGTPVLFLHGNPTSSYVWRNIIPHVAPTHRCIAPDLIGMGKSDKPDLGYFFDDHVRFMDAFIEALGLEEVVLVIHDWGSALGFHWAKRNPERVKGIAFMAFIRPIPTWDEWPEFARETFQAFRTTDVGRKLIIDQNVFIEGTLPMGVVRPLTEVEMDHYREPFLNPVDREPLWRFPNELPIAGEPANIVALVEEYMDWLHQSPVPKLLFWGTPGVLIPPAEAARLAKSLPNCKAVDIGPGLNLLQEDNPDLIGSEIARWLSTLEISG

SEQ ID NO: 1842 - protein, 277 aa, Synthetic construct
MFHYVDVGPRDGTPVLFLHGNPTSSYVWRNIIPHVAPTHRCIAPDLIGMGKSDKPDLGYFFDDHVRFMDAFIEALGLEEVVLVIHDWGSALGFHWAKRNPERVKGIAFMEAIRPIPTWDEWPEFARETFQAFRTTDVGRKLIIDQNVFIEGTLPMGVVRPLTEVEMDHYREPFLNPVDREPLWRFPNELPIAGEPANIVALVEEYMDWLHQSPVPKLLFWGTPGVLIPPAEAARLAKSLPNCKAVDIGPGLNLLQEDNPDLIGSEIARWLSTLEISG

SEQ ID NO: 1843 - protein, 277 aa, Synthetic construct
MFHYVDVGPRDGTPVLFLHGNPTSSYVWRNIIPHVAPTHRCIAPDLIGMGKSDKPDLGYFFDDHVRFMDAFIEALGLEEVVLVIHDWGSALGFHWAKRNPERVKGIAFMETIRPIPTWDEWPEFARETFQAFRTTDVGRKLIIDQNVFIEGTLPMGVVRPLTEVEMDHYREPFLNPVDREPLWRFPNELPIAGEPANIVALVEEYMDWLHQSPVPKLLFWGTPGVLIPPAEAARLAKSLPNCKAVDIGPGLNLLQEDNPDLIGSEIARWLSTLEISG

SEQ ID NO: 1844 - protein, 277 aa, Synthetic construct
MFHYVDVGPRDGTPVLFLHGNPTSSYVWRNIIPHVAPTHRCIAPDLIGMGKSDKPDLGYFFDDHVRFMDAFIEALGLEEVVLVIHDWGSALGFHWAKRNPERVKGIAFMEVIRPIPTWDEWPEFARETFQAFRTTDVGRKLIIDQNVFIEGTLPMGVVRPLTEVEMDHYREPFLNPVDREPLWRFPNELPIAGEPANIVALVEEYMDWLHQSPVPKLLFWGTPGVLIPPAEAARLAKSLPNCKAVDIGPGLNLLQEDNPDLIGSEIARWLSTLEISG

SEQ ID NO: 1845 - protein, 277 aa, Synthetic construct
MFHYVDVGPRDGTPVLFLHGNPTSSYVWRNIIPHVAPTHRCIAPDLIGMGKSDKPDLGYFFDDHVRFMDAFIEALGLEEVVLVIHDWGSALGFHWAKRNPERVKGIAFMEGIRPIPTWDEWPEFARETFQAFRTTDVGRKLIIDQNVFIEGTLPMGVVRPLTEVEMDHYREPFLNPVDREPLWRFPNELPIAGEPANIVALVEEYMDWLHQSPVPKLLFWGTPGVLIPPAEAARLAKSLPNCKAVDIGPGLNLLQEDNPDLIGSEIARWLSTLEISG

SEQ ID NO: 1846 - protein, 277 aa, Synthetic construct
MFHYVDVGPRDGTPVLFLHGNPTSSYVWRNIIPHVAPTHRCIAPDLIGMGKSDKPDLGYFFDDHVRFMDAFIEALGLEEVVLVIHDWGSALGFHWAKRNPERVKGIAFMEMIRPIPTWDEWPEFARETFQAFRTTDVGRKLIIDQNVFIEGTLPMGVVRPLTEVEMDHYREPFLNPVDREPLWRFPNELPIAGEPANIVALVEEYMDWLHQSPVPKLLFWGTPGVLIPPAEAARLAKSLPNCKAVDIGPGLNLLQEDNPDLIGSEIARWLSTLEISG

SEQ ID NO: 1847 - protein, 277 aa, Synthetic construct
MFHYVDVGPRDGTPVLFLHGNPTSSYVWRNIIPHVAPTHRCIAPDLIGMGKSDKPDLGYFFDDHVRFMDAFIEALGLEEVVLVIHDWGSALGFHWAKRNPERVKGIAFMESIRPIPTWDEWPEFARETFQAFRTTDVGRKLIIDQNVFIEGTLPMGVVRPLTEVEMDHYREPFLNPVDREPLWRFPNELPIAGEPANIVALVEEYMDWLHQSPVPKLLFWGTPGVLIPPAEAARLAKSLPNCKAVDIGPGLNLLQEDNPDLIGSEIARWLSTLEISG

SEQ ID NO: 1848 - protein, 277 aa, Synthetic construct
MFHYVDVGPRDGTPVLFLHGNPTSSYVWRNIIPHVAPTHRCIAPDLIGMGKSDKPDLGYFFDDHVRFMDAFIEALGLEEVVLVIHDWGSALGFHWAKRNPERVKGIAFMEFVRPIPTWDEWPEFARETFQAFRTTDVGRKLIIDQNVFIEGTLPMGVVRPLTEVEMDHYREPFLNPVDREPLWRFPNELPIAGEPANIVALVEEYMDWLHQSPVPKLLFWGTPGVLIPPAEAARLAKSLPNCKAVDIGPGLNLLQEDNPDLIGSEIARWLSTLEISG

SEQ ID NO: 1849 - protein, 277 aa, Synthetic construct
MFHYVDVGPRDGTPVLFLHGNPTSSYVWRNIIPHVAPTHRCIAPDLIGMGKSDKPDLGYFFDDHVRFMDAFIEALGLEEVVLVIHDWGSALGFHWAKRNPERVKGIAFMEFLRPIPTWDEWPEFARETFQAFRTTDVGRKLIIDQNVFIEGTLPMGVVRPLTEVEMDHYREPFLNPVDREPLWRFPNELPIAGEPANIVALVEEYMDWLHQSPVPKLLFWGTPGVLIPPAEAARLAKSLPNCKAVDIGPGLNLLQEDNPDLIGSEIARWLSTLEISG

SEQ ID NO: 1850 - protein, 277 aa, Synthetic construct
MFHYVDVGPRDGTPVLFLHGNPTSSYVWRNIIPHVAPTHRCIAPDLIGMGKSDKPDLGYFFDDHVRFMDAFIEALGLEEVVLVIHDWGSALGFHWAKRNPERVKGIAFMEFMRPIPTWDEWPEFARETFQAFRTTDVGRKLIIDQNVFIEGTLPMGVVRPLTEVEMDHYREPFLNPVDREPLWRFPNELPIAGEPANIVALVEEYMDWLHQSPVPKLLFWGTPGVLIPPAEAARLAKSLPNCKAVDIGPGLNLLQEDNPDLIGSEIARWLSTLEISG

SEQ ID NO: 1851 - protein, 277 aa, Synthetic construct
MFHYVDVGPRDGTPVLFLHGNPTSSYVWRNIIPHVAPTHRCIAPDLIGMGKSDKPDLGYFFDDHVRFMDAFIEALGLEEVVLVIHDWGSALGFHWAKRNPERVKGIAFMEFARPIPTWDEWPEFARETFQAFRTTDVGRKLIIDQNVFIEGTLPMGVVRPLTEVEMDHYREPFLNPVDREPLWRFPNELPIAGEPANIVALVEEYMDWLHQSPVPKLLFWGTPGVLIPPAEAARLAKSLPNCKAVDIGPGLNLLQEDNPDLIGSEIARWLSTLEISG

SEQ ID NO: 1852 - protein, 277 aa, Synthetic construct
MFHYVDVGPRDGTPVLFLHGNPTSSYVWRNIIPHVAPTHRCIAPDLIGMGKSDKPDLGYFFDDHVRFMDAFIEALGLEEVVLVIHDWGSALGFHWAKRNPERVKGIAFMEFFRPIPTWDEWPEFARETFQAFRTTDVGRKLIIDQNVFIEGTLPMGVVRPLTEVEMDHYREPFLNPVDREPLWRFPNELPIAGEPANIVALVEEYMDWLHQSPVPKLLFWGTPGVLIPPAEAARLAKSLPNCKAVDIGPGLNLLQEDNPDLIGSEIARWLSTLEISG

SEQ ID NO: 1853 - protein, 277 aa, Synthetic construct
MFHYVDVGPRDGTPVLFLHGNPTSSYVWRNIIPHVAPTHRCIAPDLIGMGKSDKPDLGYFFDDHVRFMDAFIEALGLEEVVLVIHDWGSALGFHWAKRNPERVKGIAFMEFTRPIPTWDEWPEFARETFQAFRTTDVGRKLIIDQNVFIEGTLPMGVVRPLTEVEMDHYREPFLNPVDREPLWRFPNELPIAGEPANIVALVEEYMDWLHQSPVPKLLFWGTPGVLIPPAEAARLAKSLPNCKAVDIGPGLNLLQEDNPDLIGSEIARWLSTLEISG

SEQ ID NO: 1854 - protein, 277 aa, Synthetic construct
MFHYVDVGPRDGTPVLFLHGNPTSSYVWRNIIPHVAPTHRCIAPDLIGMGKSDKPDLGYFFDDHVRFMDAFIEALGLEEVVLVIHDWGSALGFHWAKRNPERVKGIAFMEFIAPIPTWDEWPEFARETFQAFRTTDVGRKLIIDQNVFIEGTLPMGVVRPLTEVEMDHYREPFLNPVDREPLWRFPNELPIAGEPANIVALVEEYMDWLHQSPVPKLLFWGTPGVLIPPAEAARLAKSLPNCKAVDIGPGLNLLQEDNPDLIGSEIARWLSTLEISG

SEQ ID NO: 1855 - protein, 277 aa, Synthetic construct
MFHYVDVGPRDGTPVLFLHGNPTSSYVWRNIIPHVAPTHRCIAPDLIGMGKSDKPDLGYFFDDHVRFMDAFIEALGLEEVVLVIHDWGSALGFHWAKRNPERVKGIAFMEFIVPIPTWDEWPEFARETFQAFRTTDVGRKLIIDQNVFIEGTLPMGVVRPLTEVEMDHYREPFLNPVDREPLWRFPNELPIAGEPANIVALVEEYMDWLHQSPVPKLLFWGTPGVLIPPAEAARLAKSLPNCKAVDIGPGLNLLQEDNPDLIGSEIARWLSTLEISG

SEQ ID NO: 1856 - protein, 277 aa, Synthetic construct
MFHYVDVGPRDGTPVLFLHGNPTSSYVWRNIIPHVAPTHRCIAPDLIGMGKSDKPDLGYFFDDHVRFMDAFIEALGLEEVVLVIHDWGSALGFHWAKRNPERVKGIAFMEFILPIPTWDEWPEFARETFQAFRTTDVGRKLIIDQNVFIEGTLPMGVVRPLTEVEMDHYREPFLNPVDREPLWRFPNELPIAGEPANIVALVEEYMDWLHQSPVPKLLFWGTPGVLIPPAEAARLAKSLPNCKAVDIGPGLNLLQEDNPDLIGSEIARWLSTLEISG

SEQ ID NO: 1857 - protein, 277 aa, Synthetic construct
MFHYVDVGPRDGTPVLFLHGNPTSSYVWRNIIPHVAPTHRCIAPDLIGMGKSDKPDLGYFFDDHVRFMDAFIEALGLEEVVLVIHDWGSALGFHWAKRNPERVKGIAFMEFITPIPTWDEWPEFARETFQAFRTTDVGRKLIIDQNVFIEGTLPMGVVRPLTEVEMDHYREPFLNPVDREPLWRFPNELPIAGEPANIVALVEEYMDWLHQSPVPKLLFWGTPGVLIPPAEAARLAKSLPNCKAVDIGPGLNLLQEDNPDLIGSEIARWLSTLEISG

SEQ ID NO: 1858 - protein, 277 aa, Synthetic construct
MFHYVDVGPRDGTPVLFLHGNPTSSYVWRNIIPHVAPTHRCIAPDLIGMGKSDKPDLGYFFDDHVRFMDAFIEALGLEEVVLVIHDWGSALGFHWAKRNPERVKGIAFMEFIGPIPTWDEWPEFARETFQAFRTTDVGRKLIIDQNVFIEGTLPMGVVRPLTEVEMDHYREPFLNPVDREPLWRFPNELPIAGEPANIVALVEEYMDWLHQSPVPKLLFWGTPGVLIPPAEAARLAKSLPNCKAVDIGPGLNLLQEDNPDLIGSEIARWLSTLEISG

SEQ ID NO: 1859 - protein, 277 aa, Synthetic construct
MFHYVDVGPRDGTPVLFLHGNPTSSYVWRNIIPHVAPTHRCIAPDLIGMGKSDKPDLGYFFDDHVRFMDAFIEALGLEEVVLVIHDWGSALGFHWAKRNPERVKGIAFMEFISPIPTWDEWPEFARETFQAFRTTDVGRKLIIDQNVFIEGTLPMGVVRPLTEVEMDHYREPFLNPVDREPLWRFPNELPIAGEPANIVALVEEYMDWLHQSPVPKLLFWGTPGVLIPPAEAARLAKSLPNCKAVDIGPGLNLLQEDNPDLIGSEIARWLSTLEISG

SEQ ID NO: 1860 - protein, 277 aa, Synthetic construct
MFHYVDVGPRDGTPVLFLHGNPTSSYVWRNIIPHVAPTHRCIAPDLIGMGKSDKPDLGYFFDDHVRFMDAFIEALGLEEVVLVIHDWGSALGFHWAKRNPERVKGIAFMEFIRTIPTWDEWPEFARETFQAFRTTDVGRKLIIDQNVFIEGTLPMGVVRPLTEVEMDHYREPFLNPVDREPLWRFPNELPIAGEPANIVALVEEYMDWLHQSPVPKLLFWGTPGVLIPPAEAARLAKSLPNCKAVDIGPGLNLLQEDNPDLIGSEIARWLSTLEISG

SEQ ID NO: 1861 - protein, 277 aa, Synthetic construct
MFHYVDVGPRDGTPVLFLHGNPTSSYVWRNIIPHVAPTHRCIAPDLIGMGKSDKPDLGYFFDDHVRFMDAFIEALGLEEVVLVIHDWGSALGFHWAKRNPERVKGIAFMEFIRAIPTWDEWPEFARETFQAFRTTDVGRKLIIDQNVFIEGTLPMGVVRPLTEVEMDHYREPFLNPVDREPLWRFPNELPIAGEPANIVALVEEYMDWLHQSPVPKLLFWGTPGVLIPPAEAARLAKSLPNCKAVDIGPGLNLLQEDNPDLIGSEIARWLSTLEISG

SEQ ID NO: 1862 - protein, 277 aa, Synthetic construct
MFHYVDVGPRDGTPVLFLHGNPTSSYVWRNIIPHVAPTHRCIAPDLIGMGKSDKPDLGYFFDDHVRFMDAFIEALGLEEVVLVIHDWGSALGFHWAKRNPERVKGIAFMEFIRRIPTWDEWPEFARETFQAFRTTDVGRKLIIDQNVFIEGTLPMGVVRPLTEVEMDHYREPFLNPVDREPLWRFPNELPIAGEPANIVALVEEYMDWLHQSPVPKLLFWGTPGVLIPPAEAARLAKSLPNCKAVDIGPGLNLLQEDNPDLIGSEIARWLSTLEISG

SEQ ID NO: 1863 - protein, 277 aa, Synthetic construct
MFHYVDVGPRDGTPVLFLHGNPTSSYVWRNIIPHVAPTHRCIAPDLIGMGKSDKPDLGYFFDDHVRFMDAFIEALGLEEVVLVIHDWGSALGFHWAKRNPERVKGIAFMEFIRSIPTWDEWPEFARETFQAFRTTDVGRKLIIDQNVFIEGTLPMGVVRPLTEVEMDHYREPFLNPVDREPLWRFPNELPIAGEPANIVALVEEYMDWLHQSPVPKLLFWGTPGVLIPPAEAARLAKSLPNCKAVDIGPGLNLLQEDNPDLIGSEIARWLSTLEISG

SEQ ID NO: 1864 - protein, 277 aa, Synthetic construct
MFHYVDVGPRDGTPVLFLHGNPTSSYVWRNIIPHVAPTHRCIAPDLIGMGKSDKPDLGYFFDDHVRFMDAFIEALGLEEVVLVIHDWGSALGFHWAKRNPERVKGIAFMEFIRQIPTWDEWPEFARETFQAFRTTDVGRKLIIDQNVFIEGTLPMGVVRPLTEVEMDHYREPFLNPVDREPLWRFPNELPIAGEPANIVALVEEYMDWLHQSPVPKLLFWGTPGVLIPPAEAARLAKSLPNCKAVDIGPGLNLLQEDNPDLIGSEIARWLSTLEISG

SEQ ID NO: 1865 - protein, 277 aa, Synthetic construct
MFHYVDVGPRDGTPVLFLHGNPTSSYVWRNIIPHVAPTHRCIAPDLIGMGKSDKPDLGYFFDDHVRFMDAFIEALGLEEVVLVIHDWGSALGFHWAKRNPERVKGIAFMEFIRLIPTWDEWPEFARETFQAFRTTDVGRKLIIDQNVFIEGTLPMGVVRPLTEVEMDHYREPFLNPVDREPLWRFPNELPIAGEPANIVALVEEYMDWLHQSPVPKLLFWGTPGVLIPPAEAARLAKSLPNCKAVDIGPGLNLLQEDNPDLIGSEIARWLSTLEISG

SEQ ID NO: 1866 - protein, 277 aa, Synthetic construct
MFHYVDVGPRDGTPVLFLHGNPTSSYVWRNIIPHVAPTHRCIAPDLIGMGKSDKPDLGYFFDDHVRFMDAFIEALGLEEVVLVIHDWGSALGFHWAKRNPERVKGIAFMEFIRPLPTWDEWPEFARETFQAFRTTDVGRKLIIDQNVFIEGTLPMGVVRPLTEVEMDHYREPFLNPVDREPLWRFPNELPIAGEPANIVALVEEYMDWLHQSPVPKLLFWGTPGVLIPPAEAARLAKSLPNCKAVDIGPGLNLLQEDNPDLIGSEIARWLSTLEISG

SEQ ID NO: 1867 - protein, 277 aa, Synthetic construct
MFHYVDVGPRDGTPVLFLHGNPTSSYVWRNIIPHVAPTHRCIAPDLIGMGKSDKPDLGYFFDDHVRFMDAFIEALGLEEVVLVIHDWGSALGFHWAKRNPERVKGIAFMEFIRPMPTWDEWPEFARETFQAFRTTDVGRKLIIDQNVFIEGTLPMGVVRPLTEVEMDHYREPFLNPVDREPLWRFPNELPIAGEPANIVALVEEYMDWLHQSPVPKLLFWGTPGVLIPPAEAARLAKSLPNCKAVDIGPGLNLLQEDNPDLIGSEIARWLSTLEISG

SEQ ID NO: 1868 - protein, 277 aa, Synthetic construct
MFHYVDVGPRDGTPVLFLHGNPTSSYVWRNIIPHVAPTHRCIAPDLIGMGKSDKPDLGYFFDDHVRFMDAFIEALGLEEVVLVIHDWGSALGFHWAKRNPERVKGIAFMEFIRPFPTWDEWPEFARETFQAFRTTDVGRKLIIDQNVFIEGTLPMGVVRPLTEVEMDHYREPFLNPVDREPLWRFPNELPIAGEPANIVALVEEYMDWLHQSPVPKLLFWGTPGVLIPPAEAARLAKSLPNCKAVDIGPGLNLLQEDNPDLIGSEIARWLSTLEISG

SEQ ID NO: 1869 - protein, 277 aa, Synthetic construct
MFHYVDVGPRDGTPVLFLHGNPTSSYVWRNIIPHVAPTHRCIAPDLIGMGKSDKPDLGYFFDDHVRFMDAFIEALGLEEVVLVIHDWGSALGFHWAKRNPERVKGIAFMEFIRPVPTWDEWPEFARETFQAFRTTDVGRKLIIDQNVFIEGTLPMGVVRPLTEVEMDHYREPFLNPVDREPLWRFPNELPIAGEPANIVALVEEYMDWLHQSPVPKLLFWGTPGVLIPPAEAARLAKSLPNCKAVDIGPGLNLLQEDNPDLIGSEIARWLSTLEISG

SEQ ID NO: 1870 - protein, 277 aa, Synthetic construct
MFHYVDVGPRDGTPVLFLHGNPTSSYVWRNIIPHVAPTHRCIAPDLIGMGKSDKPDLGYFFDDHVRFMDAFIEALGLEEVVLVIHDWGSALGFHWAKRNPERVKGIAFMEFIRPTPTWDEWPEFARETFQAFRTTDVGRKLIIDQNVFIEGTLPMGVVRPLTEVEMDHYREPFLNPVDREPLWRFPNELPIAGEPANIVALVEEYMDWLHQSPVPKLLFWGTPGVLIPPAEAARLAKSLPNCKAVDIGPGLNLLQEDNPDLIGSEIARWLSTLEISG

SEQ ID NO: 1871 - protein, 277 aa, Synthetic construct
MFHYVDVGPRDGTPVLFLHGNPTSSYVWRNIIPHVAPTHRCIAPDLIGMGKSDKPDLGYFFDDHVRFMDAFIEALGLEEVVLVIHDWGSALGFHWAKRNPERVKGIAFMEFIRPAPTWDEWPEFARETFQAFRTTDVGRKLIIDQNVFIEGTLPMGVVRPLTEVEMDHYREPFLNPVDREPLWRFPNELPIAGEPANIVALVEEYMDWLHQSPVPKLLFWGTPGVLIPPAEAARLAKSLPNCKAVDIGPGLNLLQEDNPDLIGSEIARWLSTLEISG

SEQ ID NO: 1872 - protein, 277 aa, Synthetic construct
MFHYVDVGPRDGTPVLFLHGNPTSSYVWRNIIPHVAPTHRCIAPDLIGMGKSDKPDLGYFFDDHVRFMDAFIEALGLEEVVLVIHDWGSALGFHWAKRNPERVKGIAFMEFIRPIATWDEWPEFARETFQAFRTTDVGRKLIIDQNVFIEGTLPMGVVRPLTEVEMDHYREPFLNPVDREPLWRFPNELPIAGEPANIVALVEEYMDWLHQSPVPKLLFWGTPGVLIPPAEAARLAKSLPNCKAVDIGPGLNLLQEDNPDLIGSEIARWLSTLEISG

SEQ ID NO: 1873 - protein, 277 aa, Synthetic construct
MFHYVDVGPRDGTPVLFLHGNPTSSYVWRNIIPHVAPTHRCIAPDLIGMGKSDKPDLGYFFDDHVRFMDAFIEALGLEEVVLVIHDWGSALGFHWAKRNPERVKGIAFMEFIRPILTWDEWPEFARETFQAFRTTDVGRKLIIDQNVFIEGTLPMGVVRPLTEVEMDHYREPFLNPVDREPLWRFPNELPIAGEPANIVALVEEYMDWLHQSPVPKLLFWGTPGVLIPPAEAARLAKSLPNCKAVDIGPGLNLLQEDNPDLIGSEIARWLSTLEISG

SEQ ID NO: 1874 - protein, 277 aa, Synthetic construct
MFHYVDVGPRDGTPVLFLHGNPTSSYVWRNIIPHVAPTHRCIAPDLIGMGKSDKPDLGYFFDDHVRFMDAFIEALGLEEVVLVIHDWGSALGFHWAKRNPERVKGIAFMEFIRPITTWDEWPEFARETFQAFRTTDVGRKLIIDQNVFIEGTLPMGVVRPLTEVEMDHYREPFLNPVDREPLWRFPNELPIAGEPANIVALVEEYMDWLHQSPVPKLLFWGTPGVLIPPAEAARLAKSLPNCKAVDIGPGLNLLQEDNPDLIGSEIARWLSTLEISG

SEQ ID NO: 1875 - protein, 277 aa, Synthetic construct
MFHYVDVGPRDGTPVLFLHGNPTSSYVWRNIIPHVAPTHRCIAPDLIGMGKSDKPDLGYFFDDHVRFMDAFIEALGLEEVVLVIHDWGSALGFHWAKRNPERVKGIAFMEFIRPIVTWDEWPEFARETFQAFRTTDVGRKLIIDQNVFIEGTLPMGVVRPLTEVEMDHYREPFLNPVDREPLWRFPNELPIAGEPANIVALVEEYMDWLHQSPVPKLLFWGTPGVLIPPAEAARLAKSLPNCKAVDIGPGLNLLQEDNPDLIGSEIARWLSTLEISG

SEQ ID NO: 1876 - protein, 277 aa, Synthetic construct
MFHYVDVGPRDGTPVLFLHGNPTSSYVWRNIIPHVAPTHRCIAPDLIGMGKSDKPDLGYFFDDHVRFMDAFIEALGLEEVVLVIHDWGSALGFHWAKRNPERVKGIAFMEFIRPIGTWDEWPEFARETFQAFRTTDVGRKLIIDQNVFIEGTLPMGVVRPLTEVEMDHYREPFLNPVDREPLWRFPNELPIAGEPANIVALVEEYMDWLHQSPVPKLLFWGTPGVLIPPAEAARLAKSLPNCKAVDIGPGLNLLQEDNPDLIGSEIARWLSTLEISG

SEQ ID NO: 1877 - protein, 277 aa, Synthetic construct
MFHYVDVGPRDGTPVLFLHGNPTSSYVWRNIIPHVAPTHRCIAPDLIGMGKSDKPDLGYFFDDHVRFMDAFIEALGLEEVVLVIHDWGSALGFHWAKRNPERVKGIAFMEFIRPISTWDEWPEFARETFQAFRTTDVGRKLIIDQNVFIEGTLPMGVVRPLTEVEMDHYREPFLNPVDREPLWRFPNELPIAGEPANIVALVEEYMDWLHQSPVPKLLFWGTPGVLIPPAEAARLAKSLPNCKAVDIGPGLNLLQEDNPDLIGSEIARWLSTLEISG

SEQ ID NO: 1878 - protein, 277 aa, Synthetic construct
MFHYVDVGPRDGTPVLFLHGNPTSSYVWRNIIPHVAPTHRCIAPDLIGMGKSDKPDLGYFFDDHVRFMDAFIEALGLEEVVLVIHDWGSALGFHWAKRNPERVKGIAFMEFIRPIPSWDEWPEFARETFQAFRTTDVGRKLIIDQNVFIEGTLPMGVVRPLTEVEMDHYREPFLNPVDREPLWRFPNELPIAGEPANIVALVEEYMDWLHQSPVPKLLFWGTPGVLIPPAEAARLAKSLPNCKAVDIGPGLNLLQEDNPDLIGSEIARWLSTLEISG

SEQ ID NO: 1879 - protein, 277 aa, Synthetic construct
MFHYVDVGPRDGTPVLFLHGNPTSSYVWRNIIPHVAPTHRCIAPDLIGMGKSDKPDLGYFFDDHVRFMDAFIEALGLEEVVLVIHDWGSALGFHWAKRNPERVKGIAFMEFIRPIPRWDEWPEFARETFQAFRTTDVGRKLIIDQNVFIEGTLPMGVVRPLTEVEMDHYREPFLNPVDREPLWRFPNELPIAGEPANIVALVEEYMDWLHQSPVPKLLFWGTPGVLIPPAEAARLAKSLPNCKAVDIGPGLNLLQEDNPDLIGSEIARWLSTLEISG

SEQ ID NO: 1880 - protein, 277 aa, Synthetic construct
MFHYVDVGPRDGTPVLFLHGNPTSSYVWRNIIPHVAPTHRCIAPDLIGMGKSDKPDLGYFFDDHVRFMDAFIEALGLEEVVLVIHDWGSALGFHWAKRNPERVKGIAFMEFIRPIPNWDEWPEFARETFQAFRTTDVGRKLIIDQNVFIEGTLPMGVVRPLTEVEMDHYREPFLNPVDREPLWRFPNELPIAGEPANIVALVEEYMDWLHQSPVPKLLFWGTPGVLIPPAEAARLAKSLPNCKAVDIGPGLNLLQEDNPDLIGSEIARWLSTLEISG

SEQ ID NO: 1881 - protein, 277 aa, Synthetic construct
MFHYVDVGPRDGTPVLFLHGNPTSSYVWRNIIPHVAPTHRCIAPDLIGMGKSDKPDLGYFFDDHVRFMDAFIEALGLEEVVLVIHDWGSALGFHWAKRNPERVKGIAFMEFIRPIPGWDEWPEFARETFQAFRTTDVGRKLIIDQNVFIEGTLPMGVVRPLTEVEMDHYREPFLNPVDREPLWRFPNELPIAGEPANIVALVEEYMDWLHQSPVPKLLFWGTPGVLIPPAEAARLAKSLPNCKAVDIGPGLNLLQEDNPDLIGSEIARWLSTLEISG

SEQ ID NO: 1882 - protein, 277 aa, Synthetic construct
MFHYVDVGPRDGTPVLFLHGNPTSSYVWRNIIPHVAPTHRCIAPDLIGMGKSDKPDLGYFFDDHVRFMDAFIEALGLEEVVLVIHDWGSALGFHWAKRNPERVKGIAFMEFIRPIPAWDEWPEFARETFQAFRTTDVGRKLIIDQNVFIEGTLPMGVVRPLTEVEMDHYREPFLNPVDREPLWRFPNELPIAGEPANIVALVEEYMDWLHQSPVPKLLFWGTPGVLIPPAEAARLAKSLPNCKAVDIGPGLNLLQEDNPDLIGSEIARWLSTLEISG

SEQ ID NO: 1883 - protein, 277 aa, Synthetic construct
MFHYVDVGPRDGTPVLFLHGNPTSSYVWRNIIPHVAPTHRCIAPDLIGMGKSDKPDLGYFFDDHVRFMDAFIEALGLEEVVLVIHDWGSALGFHWAKRNPERVKGIAFMEFIRPIPDWDEWPEFARETFQAFRTTDVGRKLIIDQNVFIEGTLPMGVVRPLTEVEMDHYREPFLNPVDREPLWRFPNELPIAGEPANIVALVEEYMDWLHQSPVPKLLFWGTPGVLIPPAEAARLAKSLPNCKAVDIGPGLNLLQEDNPDLIGSEIARWLSTLEISG

SEQ ID NO: 1884 - protein, 277 aa, Synthetic construct
MFHYVDVGPRDGTPVLFLHGNPTSSYVWRNIIPHVAPTHRCIAPDLIGMGKSDKPDLGYFFDDHVRFMDAFIEALGLEEVVLVIHDWGSALGFHWAKRNPERVKGIAFMEFIRPIPTFDEWPEFARETFQAFRTTDVGRKLIIDQNVFIEGTLPMGVVRPLTEVEMDHYREPFLNPVDREPLWRFPNELPIAGEPANIVALVEEYMDWLHQSPVPKLLFWGTPGVLIPPAEAARLAKSLPNCKAVDIGPGLNLLQEDNPDLIGSEIARWLSTLEISG

SEQ ID NO: 1885 - protein, 277 aa, Synthetic construct
MFHYVDVGPRDGTPVLFLHGNPTSSYVWRNIIPHVAPTHRCIAPDLIGMGKSDKPDLGYFFDDHVRFMDAFIEALGLEEVVLVIHDWGSALGFHWAKRNPERVKGIAFMEFIRPIPTYDEWPEFARETFQAFRTTDVGRKLIIDQNVFIEGTLPMGVVRPLTEVEMDHYREPFLNPVDREPLWRFPNELPIAGEPANIVALVEEYMDWLHQSPVPKLLFWGTPGVLIPPAEAARLAKSLPNCKAVDIGPGLNLLQEDNPDLIGSEIARWLSTLEISG

SEQ ID NO: 1886 - protein, 277 aa, Synthetic construct
MFHYVDVGPRDGTPVLFLHGNPTSSYVWRNIIPHVAPTHRCIAPDLIGMGKSDKPDLGYFFDDHVRFMDAFIEALGLEEVVLVIHDWGSALGFHWAKRNPERVKGIAFMEFIRPIPTLDEWPEFARETFQAFRTTDVGRKLIIDQNVFIEGTLPMGVVRPLTEVEMDHYREPFLNPVDREPLWRFPNELPIAGEPANIVALVEEYMDWLHQSPVPKLLFWGTPGVLIPPAEAARLAKSLPNCKAVDIGPGLNLLQEDNPDLIGSEIARWLSTLEISG

SEQ ID NO: 1887 - protein, 277 aa, Synthetic construct
MFHYVDVGPRDGTPVLFLHGNPTSSYVWRNIIPHVAPTHRCIAPDLIGMGKSDKPDLGYFFDDHVRFMDAFIEALGLEEVVLVIHDWGSALGFHWAKRNPERVKGIAFMEFIRPIPTADEWPEFARETFQAFRTTDVGRKLIIDQNVFIEGTLPMGVVRPLTEVEMDHYREPFLNPVDREPLWRFPNELPIAGEPANIVALVEEYMDWLHQSPVPKLLFWGTPGVLIPPAEAARLAKSLPNCKAVDIGPGLNLLQEDNPDLIGSEIARWLSTLEISG

SEQ ID NO: 1888 - protein, 277 aa, Synthetic construct
MFHYVDVGPRDGTPVLFLHGNPTSSYVWRNIIPHVAPTHRCIAPDLIGMGKSDKPDLGYFFDDHVRFMDAFIEALGLEEVVLVIHDWGSALGFHWAKRNPERVKGIAFMEFIRPIPTRDEWPEFARETFQAFRTTDVGRKLIIDQNVFIEGTLPMGVVRPLTEVEMDHYREPFLNPVDREPLWRFPNELPIAGEPANIVALVEEYMDWLHQSPVPKLLFWGTPGVLIPPAEAARLAKSLPNCKAVDIGPGLNLLQEDNPDLIGSEIARWLSTLEISG

SEQ ID NO: 1889 - protein, 277 aa, Synthetic construct
MFHYVDVGPRDGTPVLFLHGNPTSSYVWRNIIPHVAPTHRCIAPDLIGMGKSDKPDLGYFFDDHVRFMDAFIEALGLEEVVLVIHDWGSALGFHWAKRNPERVKGIAFMEFIRPIPTMDEWPEFARETFQAFRTTDVGRKLIIDQNVFIEGTLPMGVVRPLTEVEMDHYREPFLNPVDREPLWRFPNELPIAGEPANIVALVEEYMDWLHQSPVPKLLFWGTPGVLIPPAEAARLAKSLPNCKAVDIGPGLNLLQEDNPDLIGSEIARWLSTLEISG

SEQ ID NO: 1890 - protein, 277 aa, Synthetic construct
MFHYVDVGPRDGTPVLFLHGNPTSSYVWRNIIPHVAPTHRCIAPDLIGMGKSDKPDLGYFFDDHVRFMDAFIEALGLEEVVLVIHDWGSALGFHWAKRNPERVKGIAFMEFIRPIPTWEEWPEFARETFQAFRTTDVGRKLIIDQNVFIEGTLPMGVVRPLTEVEMDHYREPFLNPVDREPLWRFPNELPIAGEPANIVALVEEYMDWLHQSPVPKLLFWGTPGVLIPPAEAARLAKSLPNCKAVDIGPGLNLLQEDNPDLIGSEIARWLSTLEISG

SEQ ID NO: 1891 - protein, 277 aa, Synthetic construct
MFHYVDVGPRDGTPVLFLHGNPTSSYVWRNIIPHVAPTHRCIAPDLIGMGKSDKPDLGYFFDDHVRFMDAFIEALGLEEVVLVIHDWGSALGFHWAKRNPERVKGIAFMEFIRPIPTWAEWPEFARETFQAFRTTDVGRKLIIDQNVFIEGTLPMGVVRPLTEVEMDHYREPFLNPVDREPLWRFPNELPIAGEPANIVALVEEYMDWLHQSPVPKLLFWGTPGVLIPPAEAARLAKSLPNCKAVDIGPGLNLLQEDNPDLIGSEIARWLSTLEISG

SEQ ID NO: 1892 - protein, 277 aa, Synthetic construct
MFHYVDVGPRDGTPVLFLHGNPTSSYVWRNIIPHVAPTHRCIAPDLIGMGKSDKPDLGYFFDDHVRFMDAFIEALGLEEVVLVIHDWGSALGFHWAKRNPERVKGIAFMEFIRPIPTWSEWPEFARETFQAFRTTDVGRKLIIDQNVFIEGTLPMGVVRPLTEVEMDHYREPFLNPVDREPLWRFPNELPIAGEPANIVALVEEYMDWLHQSPVPKLLFWGTPGVLIPPAEAARLAKSLPNCKAVDIGPGLNLLQEDNPDLIGSEIARWLSTLEISG

SEQ ID NO: 1893 - protein, 277 aa, Synthetic construct
MFHYVDVGPRDGTPVLFLHGNPTSSYVWRNIIPHVAPTHRCIAPDLIGMGKSDKPDLGYFFDDHVRFMDAFIEALGLEEVVLVIHDWGSALGFHWAKRNPERVKGIAFMEFIRPIPTWNEWPEFARETFQAFRTTDVGRKLIIDQNVFIEGTLPMGVVRPLTEVEMDHYREPFLNPVDREPLWRFPNELPIAGEPANIVALVEEYMDWLHQSPVPKLLFWGTPGVLIPPAEAARLAKSLPNCKAVDIGPGLNLLQEDNPDLIGSEIARWLSTLEISG

SEQ ID NO: 1894 - protein, 277 aa, Synthetic construct
MFHYVDVGPRDGTPVLFLHGNPTSSYVWRNIIPHVAPTHRCIAPDLIGMGKSDKPDLGYFFDDHVRFMDAFIEALGLEEVVLVIHDWGSALGFHWAKRNPERVKGIAFMEFIRPIPTWQEWPEFARETFQAFRTTDVGRKLIIDQNVFIEGTLPMGVVRPLTEVEMDHYREPFLNPVDREPLWRFPNELPIAGEPANIVALVEEYMDWLHQSPVPKLLFWGTPGVLIPPAEAARLAKSLPNCKAVDIGPGLNLLQEDNPDLIGSEIARWLSTLEISG

SEQ ID NO: 1895 - protein, 277 aa, Synthetic construct
MFHYVDVGPRDGTPVLFLHGNPTSSYVWRNIIPHVAPTHRCIAPDLIGMGKSDKPDLGYFFDDHVRFMDAFIEALGLEEVVLVIHDWGSALGFHWAKRNPERVKGIAFMEFIRPIPTWGEWPEFARETFQAFRTTDVGRKLIIDQNVFIEGTLPMGVVRPLTEVEMDHYREPFLNPVDREPLWRFPNELPIAGEPANIVALVEEYMDWLHQSPVPKLLFWGTPGVLIPPAEAARLAKSLPNCKAVDIGPGLNLLQEDNPDLIGSEIARWLSTLEISG

SEQ ID NO: 1896 - protein, 277 aa, Synthetic construct
MFHYVDVGPRDGTPVLFLHGNPTSSYVWRNIIPHVAPTHRCIAPDLIGMGKSDKPDLGYFFDDHVRFMDAFIEALGLEEVVLVIHDWGSALGFHWAKRNPERVKGIAFMEFIRPIPTWDDWPEFARETFQAFRTTDVGRKLIIDQNVFIEGTLPMGVVRPLTEVEMDHYREPFLNPVDREPLWRFPNELPIAGEPANIVALVEEYMDWLHQSPVPKLLFWGTPGVLIPPAEAARLAKSLPNCKAVDIGPGLNLLQEDNPDLIGSEIARWLSTLEISG

SEQ ID NO: 1897 - protein, 277 aa, Synthetic construct
MFHYVDVGPRDGTPVLFLHGNPTSSYVWRNIIPHVAPTHRCIAPDLIGMGKSDKPDLGYFFDDHVRFMDAFIEALGLEEVVLVIHDWGSALGFHWAKRNPERVKGIAFMEFIRPIPTWDQWPEFARETFQAFRTTDVGRKLIIDQNVFIEGTLPMGVVRPLTEVEMDHYREPFLNPVDREPLWRFPNELPIAGEPANIVALVEEYMDWLHQSPVPKLLFWGTPGVLIPPAEAARLAKSLPNCKAVDIGPGLNLLQEDNPDLIGSEIARWLSTLEISG

SEQ ID NO: 1898 - protein, 277 aa, Synthetic construct
MFHYVDVGPRDGTPVLFLHGNPTSSYVWRNIIPHVAPTHRCIAPDLIGMGKSDKPDLGYFFDDHVRFMDAFIEALGLEEVVLVIHDWGSALGFHWAKRNPERVKGIAFMEFIRPIPTWDAWPEFARETFQAFRTTDVGRKLIIDQNVFIEGTLPMGVVRPLTEVEMDHYREPFLNPVDREPLWRFPNELPIAGEPANIVALVEEYMDWLHQSPVPKLLFWGTPGVLIPPAEAARLAKSLPNCKAVDIGPGLNLLQEDNPDLIGSEIARWLSTLEISG

SEQ ID NO: 1899 - protein, 277 aa, Synthetic construct
MFHYVDVGPRDGTPVLFLHGNPTSSYVWRNIIPHVAPTHRCIAPDLIGMGKSDKPDLGYFFDDHVRFMDAFIEALGLEEVVLVIHDWGSALGFHWAKRNPERVKGIAFMEFIRPIPTWDTWPEFARETFQAFRTTDVGRKLIIDQNVFIEGTLPMGVVRPLTEVEMDHYREPFLNPVDREPLWRFPNELPIAGEPANIVALVEEYMDWLHQSPVPKLLFWGTPGVLIPPAEAARLAKSLPNCKAVDIGPGLNLLQEDNPDLIGSEIARWLSTLEISG

SEQ ID NO: 1900 - protein, 277 aa, Synthetic construct
MFHYVDVGPRDGTPVLFLHGNPTSSYVWRNIIPHVAPTHRCIAPDLIGMGKSDKPDLGYFFDDHVRFMDAFIEALGLEEVVLVIHDWGSALGFHWAKRNPERVKGIAFMEFIRPIPTWDSWPEFARETFQAFRTTDVGRKLIIDQNVFIEGTLPMGVVRPLTEVEMDHYREPFLNPVDREPLWRFPNELPIAGEPANIVALVEEYMDWLHQSPVPKLLFWGTPGVLIPPAEAARLAKSLPNCKAVDIGPGLNLLQEDNPDLIGSEIARWLSTLEISG

SEQ ID NO: 1901 - protein, 277 aa, Synthetic construct
MFHYVDVGPRDGTPVLFLHGNPTSSYVWRNIIPHVAPTHRCIAPDLIGMGKSDKPDLGYFFDDHVRFMDAFIEALGLEEVVLVIHDWGSALGFHWAKRNPERVKGIAFMEFIRPIPTWDKWPEFARETFQAFRTTDVGRKLIIDQNVFIEGTLPMGVVRPLTEVEMDHYREPFLNPVDREPLWRFPNELPIAGEPANIVALVEEYMDWLHQSPVPKLLFWGTPGVLIPPAEAARLAKSLPNCKAVDIGPGLNLLQEDNPDLIGSEIARWLSTLEISG

SEQ ID NO: 1902 - protein, 277 aa, Synthetic construct
MFHYVDVGPRDGTPVLFLHGNPTSSYVWRNIIPHVAPTHRCIAPDLIGMGKSDKPDLGYFFDDHVRFMDAFIEALGLEEVVLVIHDWGSALGFHWAKRNPERVKGIAFMEFIRPIPTWDEFPEFARETFQAFRTTDVGRKLIIDQNVFIEGTLPMGVVRPLTEVEMDHYREPFLNPVDREPLWRFPNELPIAGEPANIVALVEEYMDWLHQSPVPKLLFWGTPGVLIPPAEAARLAKSLPNCKAVDIGPGLNLLQEDNPDLIGSEIARWLSTLEISG

SEQ ID NO: 1903 - protein, 277 aa, Synthetic construct
MFHYVDVGPRDGTPVLFLHGNPTSSYVWRNIIPHVAPTHRCIAPDLIGMGKSDKPDLGYFFDDHVRFMDAFIEALGLEEVVLVIHDWGSALGFHWAKRNPERVKGIAFMEFIRPIPTWDELPEFARETFQAFRTTDVGRKLIIDQNVFIEGTLPMGVVRPLTEVEMDHYREPFLNPVDREPLWRFPNELPIAGEPANIVALVEEYMDWLHQSPVPKLLFWGTPGVLIPPAEAARLAKSLPNCKAVDIGPGLNLLQEDNPDLIGSEIARWLSTLEISG

SEQ ID NO: 1904 - protein, 277 aa, Synthetic construct
MFHYVDVGPRDGTPVLFLHGNPTSSYVWRNIIPHVAPTHRCIAPDLIGMGKSDKPDLGYFFDDHVRFMDAFIEALGLEEVVLVIHDWGSALGFHWAKRNPERVKGIAFMEFIRPIPTWDEMPEFARETFQAFRTTDVGRKLIIDQNVFIEGTLPMGVVRPLTEVEMDHYREPFLNPVDREPLWRFPNELPIAGEPANIVALVEEYMDWLHQSPVPKLLFWGTPGVLIPPAEAARLAKSLPNCKAVDIGPGLNLLQEDNPDLIGSEIARWLSTLEISG

SEQ ID NO: 1905 - protein, 277 aa, Synthetic construct
MFHYVDVGPRDGTPVLFLHGNPTSSYVWRNIIPHVAPTHRCIAPDLIGMGKSDKPDLGYFFDDHVRFMDAFIEALGLEEVVLVIHDWGSALGFHWAKRNPERVKGIAFMEFIRPIPTWDEYPEFARETFQAFRTTDVGRKLIIDQNVFIEGTLPMGVVRPLTEVEMDHYREPFLNPVDREPLWRFPNELPIAGEPANIVALVEEYMDWLHQSPVPKLLFWGTPGVLIPPAEAARLAKSLPNCKAVDIGPGLNLLQEDNPDLIGSEIARWLSTLEISG

SEQ ID NO: 1906 - protein, 277 aa, Synthetic construct
MFHYVDVGPRDGTPVLFLHGNPTSSYVWRNIIPHVAPTHRCIAPDLIGMGKSDKPDLGYFFDDHVRFMDAFIEALGLEEVVLVIHDWGSALGFHWAKRNPERVKGIAFMEFIRPIPTWDEIPEFARETFQAFRTTDVGRKLIIDQNVFIEGTLPMGVVRPLTEVEMDHYREPFLNPVDREPLWRFPNELPIAGEPANIVALVEEYMDWLHQSPVPKLLFWGTPGVLIPPAEAARLAKSLPNCKAVDIGPGLNLLQEDNPDLIGSEIARWLSTLEISG

SEQ ID NO: 1907 - protein, 277 aa, Synthetic construct
MFHYVDVGPRDGTPVLFLHGNPTSSYVWRNIIPHVAPTHRCIAPDLIGMGKSDKPDLGYFFDDHVRFMDAFIEALGLEEVVLVIHDWGSALGFHWAKRNPERVKGIAFMEFIRPIPTWDEVPEFARETFQAFRTTDVGRKLIIDQNVFIEGTLPMGVVRPLTEVEMDHYREPFLNPVDREPLWRFPNELPIAGEPANIVALVEEYMDWLHQSPVPKLLFWGTPGVLIPPAEAARLAKSLPNCKAVDIGPGLNLLQEDNPDLIGSEIARWLSTLEISG

SEQ ID NO: 1908 - protein, 277 aa, Synthetic construct
MFHYVDVGPRDGTPVLFLHGNPTSSYVWRNIIPHVAPTHRCIAPDLIGMGKSDKPDLGYFFDDHVRFMDAFIEALGLEEVVLVIHDWGSALGFHWAKRNPERVKGIAFMEFIRPIPTWDEWSEFARETFQAFRTTDVGRKLIIDQNVFIEGTLPMGVVRPLTEVEMDHYREPFLNPVDREPLWRFPNELPIAGEPANIVALVEEYMDWLHQSPVPKLLFWGTPGVLIPPAEAARLAKSLPNCKAVDIGPGLNLLQEDNPDLIGSEIARWLSTLEISG

SEQ ID NO: 1909 - protein, 277 aa, Synthetic construct
MFHYVDVGPRDGTPVLFLHGNPTSSYVWRNIIPHVAPTHRCIAPDLIGMGKSDKPDLGYFFDDHVRFMDAFIEALGLEEVVLVIHDWGSALGFHWAKRNPERVKGIAFMEFIRPIPTWDEWGEFARETFQAFRTTDVGRKLIIDQNVFIEGTLPMGVVRPLTEVEMDHYREPFLNPVDREPLWRFPNELPIAGEPANIVALVEEYMDWLHQSPVPKLLFWGTPGVLIPPAEAARLAKSLPNCKAVDIGPGLNLLQEDNPDLIGSEIARWLSTLEISG

SEQ ID NO: 1910 - protein, 277 aa, Synthetic construct
MFHYVDVGPRDGTPVLFLHGNPTSSYVWRNIIPHVAPTHRCIAPDLIGMGKSDKPDLGYFFDDHVRFMDAFIEALGLEEVVLVIHDWGSALGFHWAKRNPERVKGIAFMEFIRPIPTWDEWTEFARETFQAFRTTDVGRKLIIDQNVFIEGTLPMGVVRPLTEVEMDHYREPFLNPVDREPLWRFPNELPIAGEPANIVALVEEYMDWLHQSPVPKLLFWGTPGVLIPPAEAARLAKSLPNCKAVDIGPGLNLLQEDNPDLIGSEIARWLSTLEISG

SEQ ID NO: 1911 - protein, 277 aa, Synthetic construct
MFHYVDVGPRDGTPVLFLHGNPTSSYVWRNIIPHVAPTHRCIAPDLIGMGKSDKPDLGYFFDDHVRFMDAFIEALGLEEVVLVIHDWGSALGFHWAKRNPERVKGIAFMEFIRPIPTWDEWDEFARETFQAFRTTDVGRKLIIDQNVFIEGTLPMGVVRPLTEVEMDHYREPFLNPVDREPLWRFPNELPIAGEPANIVALVEEYMDWLHQSPVPKLLFWGTPGVLIPPAEAARLAKSLPNCKAVDIGPGLNLLQEDNPDLIGSEIARWLSTLEISG

SEQ ID NO: 1912 - protein, 277 aa, Synthetic construct
MFHYVDVGPRDGTPVLFLHGNPTSSYVWRNIIPHVAPTHRCIAPDLIGMGKSDKPDLGYFFDDHVRFMDAFIEALGLEEVVLVIHDWGSALGFHWAKRNPERVKGIAFMEFIRPIPTWDEWAEFARETFQAFRTTDVGRKLIIDQNVFIEGTLPMGVVRPLTEVEMDHYREPFLNPVDREPLWRFPNELPIAGEPANIVALVEEYMDWLHQSPVPKLLFWGTPGVLIPPAEAARLAKSLPNCKAVDIGPGLNLLQEDNPDLIGSEIARWLSTLEISG

SEQ ID NO: 1913 - protein, 277 aa, Synthetic construct
MFHYVDVGPRDGTPVLFLHGNPTSSYVWRNIIPHVAPTHRCIAPDLIGMGKSDKPDLGYFFDDHVRFMDAFIEALGLEEVVLVIHDWGSALGFHWAKRNPERVKGIAFMEFIRPIPTWDEWNEFARETFQAFRTTDVGRKLIIDQNVFIEGTLPMGVVRPLTEVEMDHYREPFLNPVDREPLWRFPNELPIAGEPANIVALVEEYMDWLHQSPVPKLLFWGTPGVLIPPAEAARLAKSLPNCKAVDIGPGLNLLQEDNPDLIGSEIARWLSTLEISG

SEQ ID NO: 1914 - protein, 277 aa, Synthetic construct
MFHYVDVGPRDGTPVLFLHGNPTSSYVWRNIIPHVAPTHRCIAPDLIGMGKSDKPDLGYFFDDHVRFMDAFIEALGLEEVVLVIHDWGSALGFHWAKRNPERVKGIAFMEFIRPIPTWDEWPDFARETFQAFRTTDVGRKLIIDQNVFIEGTLPMGVVRPLTEVEMDHYREPFLNPVDREPLWRFPNELPIAGEPANIVALVEEYMDWLHQSPVPKLLFWGTPGVLIPPAEAARLAKSLPNCKAVDIGPGLNLLQEDNPDLIGSEIARWLSTLEISG

SEQ ID NO: 1915 - protein, 277 aa, Synthetic construct
MFHYVDVGPRDGTPVLFLHGNPTSSYVWRNIIPHVAPTHRCIAPDLIGMGKSDKPDLGYFFDDHVRFMDAFIEALGLEEVVLVIHDWGSALGFHWAKRNPERVKGIAFMEFIRPIPTWDEWPAFARETFQAFRTTDVGRKLIIDQNVFIEGTLPMGVVRPLTEVEMDHYREPFLNPVDREPLWRFPNELPIAGEPANIVALVEEYMDWLHQSPVPKLLFWGTPGVLIPPAEAARLAKSLPNCKAVDIGPGLNLLQEDNPDLIGSEIARWLSTLEISG

SEQ ID NO: 1916 - protein, 277 aa, Synthetic construct
MFHYVDVGPRDGTPVLFLHGNPTSSYVWRNIIPHVAPTHRCIAPDLIGMGKSDKPDLGYFFDDHVRFMDAFIEALGLEEVVLVIHDWGSALGFHWAKRNPERVKGIAFMEFIRPIPTWDEWPPFARETFQAFRTTDVGRKLIIDQNVFIEGTLPMGVVRPLTEVEMDHYREPFLNPVDREPLWRFPNELPIAGEPANIVALVEEYMDWLHQSPVPKLLFWGTPGVLIPPAEAARLAKSLPNCKAVDIGPGLNLLQEDNPDLIGSEIARWLSTLEISG

SEQ ID NO: 1917 - protein, 277 aa, Synthetic construct
MFHYVDVGPRDGTPVLFLHGNPTSSYVWRNIIPHVAPTHRCIAPDLIGMGKSDKPDLGYFFDDHVRFMDAFIEALGLEEVVLVIHDWGSALGFHWAKRNPERVKGIAFMEFIRPIPTWDEWPQFARETFQAFRTTDVGRKLIIDQNVFIEGTLPMGVVRPLTEVEMDHYREPFLNPVDREPLWRFPNELPIAGEPANIVALVEEYMDWLHQSPVPKLLFWGTPGVLIPPAEAARLAKSLPNCKAVDIGPGLNLLQEDNPDLIGSEIARWLSTLEISG

SEQ ID NO: 1918 - protein, 277 aa, Synthetic construct
MFHYVDVGPRDGTPVLFLHGNPTSSYVWRNIIPHVAPTHRCIAPDLIGMGKSDKPDLGYFFDDHVRFMDAFIEALGLEEVVLVIHDWGSALGFHWAKRNPERVKGIAFMEFIRPIPTWDEWPKFARETFQAFRTTDVGRKLIIDQNVFIEGTLPMGVVRPLTEVEMDHYREPFLNPVDREPLWRFPNELPIAGEPANIVALVEEYMDWLHQSPVPKLLFWGTPGVLIPPAEAARLAKSLPNCKAVDIGPGLNLLQEDNPDLIGSEIARWLSTLEISG

SEQ ID NO: 1919 - protein, 277 aa, Synthetic construct
MFHYVDVGPRDGTPVLFLHGNPTSSYVWRNIIPHVAPTHRCIAPDLIGMGKSDKPDLGYFFDDHVRFMDAFIEALGLEEVVLVIHDWGSALGFHWAKRNPERVKGIAFMEFIRPIPTWDEWPSFARETFQAFRTTDVGRKLIIDQNVFIEGTLPMGVVRPLTEVEMDHYREPFLNPVDREPLWRFPNELPIAGEPANIVALVEEYMDWLHQSPVPKLLFWGTPGVLIPPAEAARLAKSLPNCKAVDIGPGLNLLQEDNPDLIGSEIARWLSTLEISG

SEQ ID NO: 1920 - protein, 277 aa, Synthetic construct
MFHYVDVGPRDGTPVLFLHGNPTSSYVWRNIIPHVAPTHRCIAPDLIGMGKSDKPDLGYFFDDHVRFMDAFIEALGLEEVVLVIHDWGSALGFHWAKRNPERVKGIAFMEFIRPIPTWDEWPEAARETFQAFRTTDVGRKLIIDQNVFIEGTLPMGVVRPLTEVEMDHYREPFLNPVDREPLWRFPNELPIAGEPANIVALVEEYMDWLHQSPVPKLLFWGTPGVLIPPAEAARLAKSLPNCKAVDIGPGLNLLQEDNPDLIGSEIARWLSTLEISG

SEQ ID NO: 1921 - protein, 277 aa, Synthetic construct
MFHYVDVGPRDGTPVLFLHGNPTSSYVWRNIIPHVAPTHRCIAPDLIGMGKSDKPDLGYFFDDHVRFMDAFIEALGLEEVVLVIHDWGSALGFHWAKRNPERVKGIAFMEFIRPIPTWDEWPEPARETFQAFRTTDVGRKLIIDQNVFIEGTLPMGVVRPLTEVEMDHYREPFLNPVDREPLWRFPNELPIAGEPANIVALVEEYMDWLHQSPVPKLLFWGTPGVLIPPAEAARLAKSLPNCKAVDIGPGLNLLQEDNPDLIGSEIARWLSTLEISG

SEQ ID NO: 1922 - protein, 277 aa, Synthetic construct
MFHYVDVGPRDGTPVLFLHGNPTSSYVWRNIIPHVAPTHRCIAPDLIGMGKSDKPDLGYFFDDHVRFMDAFIEALGLEEVVLVIHDWGSALGFHWAKRNPERVKGIAFMEFIRPIPTWDEWPEGARETFQAFRTTDVGRKLIIDQNVFIEGTLPMGVVRPLTEVEMDHYREPFLNPVDREPLWRFPNELPIAGEPANIVALVEEYMDWLHQSPVPKLLFWGTPGVLIPPAEAARLAKSLPNCKAVDIGPGLNLLQEDNPDLIGSEIARWLSTLEISG

SEQ ID NO: 1923 - protein, 277 aa, Synthetic construct
MFHYVDVGPRDGTPVLFLHGNPTSSYVWRNIIPHVAPTHRCIAPDLIGMGKSDKPDLGYFFDDHVRFMDAFIEALGLEEVVLVIHDWGSALGFHWAKRNPERVKGIAFMEFIRPIPTWDEWPEKARETFQAFRTTDVGRKLIIDQNVFIEGTLPMGVVRPLTEVEMDHYREPFLNPVDREPLWRFPNELPIAGEPANIVALVEEYMDWLHQSPVPKLLFWGTPGVLIPPAEAARLAKSLPNCKAVDIGPGLNLLQEDNPDLIGSEIARWLSTLEISG

SEQ ID NO: 1924 - protein, 277 aa, Synthetic construct
MFHYVDVGPRDGTPVLFLHGNPTSSYVWRNIIPHVAPTHRCIAPDLIGMGKSDKPDLGYFFDDHVRFMDAFIEALGLEEVVLVIHDWGSALGFHWAKRNPERVKGIAFMEFIRPIPTWDEWPEEARETFQAFRTTDVGRKLIIDQNVFIEGTLPMGVVRPLTEVEMDHYREPFLNPVDREPLWRFPNELPIAGEPANIVALVEEYMDWLHQSPVPKLLFWGTPGVLIPPAEAARLAKSLPNCKAVDIGPGLNLLQEDNPDLIGSEIARWLSTLEISG

SEQ ID NO: 1925 - protein, 277 aa, Synthetic construct
MFHYVDVGPRDGTPVLFLHGNPTSSYVWRNIIPHVAPTHRCIAPDLIGMGKSDKPDLGYFFDDHVRFMDAFIEALGLEEVVLVIHDWGSALGFHWAKRNPERVKGIAFMEFIRPIPTWDEWPESARETFQAFRTTDVGRKLIIDQNVFIEGTLPMGVVRPLTEVEMDHYREPFLNPVDREPLWRFPNELPIAGEPANIVALVEEYMDWLHQSPVPKLLFWGTPGVLIPPAEAARLAKSLPNCKAVDIGPGLNLLQEDNPDLIGSEIARWLSTLEISG

SEQ ID NO: 1926 - protein, 277 aa, Synthetic construct
MFHYVDVGPRDGTPVLFLHGNPTSSYVWRNIIPHVAPTHRCIAPDLIGMGKSDKPDLGYFFDDHVRFMDAFIEALGLEEVVLVIHDWGSALGFHWAKRNPERVKGIAFMEFIRPIPTWDEWPEFGRETFQAFRTTDVGRKLIIDQNVFIEGTLPMGVVRPLTEVEMDHYREPFLNPVDREPLWRFPNELPIAGEPANIVALVEEYMDWLHQSPVPKLLFWGTPGVLIPPAEAARLAKSLPNCKAVDIGPGLNLLQEDNPDLIGSEIARWLSTLEISG

SEQ ID NO: 1927 - protein, 277 aa, Synthetic construct
MFHYVDVGPRDGTPVLFLHGNPTSSYVWRNIIPHVAPTHRCIAPDLIGMGKSDKPDLGYFFDDHVRFMDAFIEALGLEEVVLVIHDWGSALGFHWAKRNPERVKGIAFMEFIRPIPTWDEWPEFVRETFQAFRTTDVGRKLIIDQNVFIEGTLPMGVVRPLTEVEMDHYREPFLNPVDREPLWRFPNELPIAGEPANIVALVEEYMDWLHQSPVPKLLFWGTPGVLIPPAEAARLAKSLPNCKAVDIGPGLNLLQEDNPDLIGSEIARWLSTLEISG

SEQ ID NO: 1928 - protein, 277 aa, Synthetic construct
MFHYVDVGPRDGTPVLFLHGNPTSSYVWRNIIPHVAPTHRCIAPDLIGMGKSDKPDLGYFFDDHVRFMDAFIEALGLEEVVLVIHDWGSALGFHWAKRNPERVKGIAFMEFIRPIPTWDEWPEFTRETFQAFRTTDVGRKLIIDQNVFIEGTLPMGVVRPLTEVEMDHYREPFLNPVDREPLWRFPNELPIAGEPANIVALVEEYMDWLHQSPVPKLLFWGTPGVLIPPAEAARLAKSLPNCKAVDIGPGLNLLQEDNPDLIGSEIARWLSTLEISG

SEQ ID NO: 1929 - protein, 277 aa, Synthetic construct
MFHYVDVGPRDGTPVLFLHGNPTSSYVWRNIIPHVAPTHRCIAPDLIGMGKSDKPDLGYFFDDHVRFMDAFIEALGLEEVVLVIHDWGSALGFHWAKRNPERVKGIAFMEFIRPIPTWDEWPEFSRETFQAFRTTDVGRKLIIDQNVFIEGTLPMGVVRPLTEVEMDHYREPFLNPVDREPLWRFPNELPIAGEPANIVALVEEYMDWLHQSPVPKLLFWGTPGVLIPPAEAARLAKSLPNCKAVDIGPGLNLLQEDNPDLIGSEIARWLSTLEISG

SEQ ID NO: 1930 - protein, 277 aa, Synthetic construct
MFHYVDVGPRDGTPVLFLHGNPTSSYVWRNIIPHVAPTHRCIAPDLIGMGKSDKPDLGYFFDDHVRFMDAFIEALGLEEVVLVIHDWGSALGFHWAKRNPERVKGIAFMEFIRPIPTWDEWPEFMRETFQAFRTTDVGRKLIIDQNVFIEGTLPMGVVRPLTEVEMDHYREPFLNPVDREPLWRFPNELPIAGEPANIVALVEEYMDWLHQSPVPKLLFWGTPGVLIPPAEAARLAKSLPNCKAVDIGPGLNLLQEDNPDLIGSEIARWLSTLEISG

SEQ ID NO: 1931 - protein, 277 aa, Synthetic construct
MFHYVDVGPRDGTPVLFLHGNPTSSYVWRNIIPHVAPTHRCIAPDLIGMGKSDKPDLGYFFDDHVRFMDAFIEALGLEEVVLVIHDWGSALGFHWAKRNPERVKGIAFMEFIRPIPTWDEWPEFIRETFQAFRTTDVGRKLIIDQNVFIEGTLPMGVVRPLTEVEMDHYREPFLNPVDREPLWRFPNELPIAGEPANIVALVEEYMDWLHQSPVPKLLFWGTPGVLIPPAEAARLAKSLPNCKAVDIGPGLNLLQEDNPDLIGSEIARWLSTLEISG

SEQ ID NO: 1932 - protein, 277 aa, Synthetic construct
MFHYVDVGPRDGTPVLFLHGNPTSSYVWRNIIPHVAPTHRCIAPDLIGMGKSDKPDLGYFFDDHVRFMDAFIEALGLEEVVLVIHDWGSALGFHWAKRNPERVKGIAFMEFIRPIPTWDEWPEFAKETFQAFRTTDVGRKLIIDQNVFIEGTLPMGVVRPLTEVEMDHYREPFLNPVDREPLWRFPNELPIAGEPANIVALVEEYMDWLHQSPVPKLLFWGTPGVLIPPAEAARLAKSLPNCKAVDIGPGLNLLQEDNPDLIGSEIARWLSTLEISG

SEQ ID NO: 1933 - protein, 277 aa, Synthetic construct
MFHYVDVGPRDGTPVLFLHGNPTSSYVWRNIIPHVAPTHRCIAPDLIGMGKSDKPDLGYFFDDHVRFMDAFIEALGLEEVVLVIHDWGSALGFHWAKRNPERVKGIAFMEFIRPIPTWDEWPEFAQETFQAFRTTDVGRKLIIDQNVFIEGTLPMGVVRPLTEVEMDHYREPFLNPVDREPLWRFPNELPIAGEPANIVALVEEYMDWLHQSPVPKLLFWGTPGVLIPPAEAARLAKSLPNCKAVDIGPGLNLLQEDNPDLIGSEIARWLSTLEISG

SEQ ID NO: 1934 - protein, 277 aa, Synthetic construct
MFHYVDVGPRDGTPVLFLHGNPTSSYVWRNIIPHVAPTHRCIAPDLIGMGKSDKPDLGYFFDDHVRFMDAFIEALGLEEVVLVIHDWGSALGFHWAKRNPERVKGIAFMEFIRPIPTWDEWPEFAAETFQAFRTTDVGRKLIIDQNVFIEGTLPMGVVRPLTEVEMDHYREPFLNPVDREPLWRFPNELPIAGEPANIVALVEEYMDWLHQSPVPKLLFWGTPGVLIPPAEAARLAKSLPNCKAVDIGPGLNLLQEDNPDLIGSEIARWLSTLEISG

SEQ ID NO: 1935 - protein, 277 aa, Synthetic construct
MFHYVDVGPRDGTPVLFLHGNPTSSYVWRNIIPHVAPTHRCIAPDLIGMGKSDKPDLGYFFDDHVRFMDAFIEALGLEEVVLVIHDWGSALGFHWAKRNPERVKGIAFMEFIRPIPTWDEWPEFALETFQAFRTTDVGRKLIIDQNVFIEGTLPMGVVRPLTEVEMDHYREPFLNPVDREPLWRFPNELPIAGEPANIVALVEEYMDWLHQSPVPKLLFWGTPGVLIPPAEAARLAKSLPNCKAVDIGPGLNLLQEDNPDLIGSEIARWLSTLEISG

SEQ ID NO: 1936 - protein, 277 aa, Synthetic construct
MFHYVDVGPRDGTPVLFLHGNPTSSYVWRNIIPHVAPTHRCIAPDLIGMGKSDKPDLGYFFDDHVRFMDAFIEALGLEEVVLVIHDWGSALGFHWAKRNPERVKGIAFMEFIRPIPTWDEWPEFAVETFQAFRTTDVGRKLIIDQNVFIEGTLPMGVVRPLTEVEMDHYREPFLNPVDREPLWRFPNELPIAGEPANIVALVEEYMDWLHQSPVPKLLFWGTPGVLIPPAEAARLAKSLPNCKAVDIGPGLNLLQEDNPDLIGSEIARWLSTLEISG

SEQ ID NO: 1937 - protein, 277 aa, Synthetic construct
MFHYVDVGPRDGTPVLFLHGNPTSSYVWRNIIPHVAPTHRCIAPDLIGMGKSDKPDLGYFFDDHVRFMDAFIEALGLEEVVLVIHDWGSALGFHWAKRNPERVKGIAFMEFIRPIPTWDEWPEFAHETFQAFRTTDVGRKLIIDQNVFIEGTLPMGVVRPLTEVEMDHYREPFLNPVDREPLWRFPNELPIAGEPANIVALVEEYMDWLHQSPVPKLLFWGTPGVLIPPAEAARLAKSLPNCKAVDIGPGLNLLQEDNPDLIGSEIARWLSTLEISG

SEQ ID NO: 1938 - protein, 277 aa, Synthetic construct
MFHYVDVGPRDGTPVLFLHGNPTSSYVWRNIIPHVAPTHRCIAPDLIGMGKSDKPDLGYFFDDHVRFMDAFIEALGLEEVVLVIHDWGSALGFHWAKRNPERVKGIAFMEFIRPIPTWDEWPEFARKTFQAFRTTDVGRKLIIDQNVFIEGTLPMGVVRPLTEVEMDHYREPFLNPVDREPLWRFPNELPIAGEPANIVALVEEYMDWLHQSPVPKLLFWGTPGVLIPPAEAARLAKSLPNCKAVDIGPGLNLLQEDNPDLIGSEIARWLSTLEISG

SEQ ID NO: 1939 - protein, 277 aa, Synthetic construct
MFHYVDVGPRDGTPVLFLHGNPTSSYVWRNIIPHVAPTHRCIAPDLIGMGKSDKPDLGYFFDDHVRFMDAFIEALGLEEVVLVIHDWGSALGFHWAKRNPERVKGIAFMEFIRPIPTWDEWPEFARATFQAFRTTDVGRKLIIDQNVFIEGTLPMGVVRPLTEVEMDHYREPFLNPVDREPLWRFPNELPIAGEPANIVALVEEYMDWLHQSPVPKLLFWGTPGVLIPPAEAARLAKSLPNCKAVDIGPGLNLLQEDNPDLIGSEIARWLSTLEISG

SEQ ID NO: 1940 - protein, 277 aa, Synthetic construct
MFHYVDVGPRDGTPVLFLHGNPTSSYVWRNIIPHVAPTHRCIAPDLIGMGKSDKPDLGYFFDDHVRFMDAFIEALGLEEVVLVIHDWGSALGFHWAKRNPERVKGIAFMEFIRPIPTWDEWPEFARQTFQAFRTTDVGRKLIIDQNVFIEGTLPMGVVRPLTEVEMDHYREPFLNPVDREPLWRFPNELPIAGEPANIVALVEEYMDWLHQSPVPKLLFWGTPGVLIPPAEAARLAKSLPNCKAVDIGPGLNLLQEDNPDLIGSEIARWLSTLEISG

SEQ ID NO: 1941 - protein, 277 aa, Synthetic construct
MFHYVDVGPRDGTPVLFLHGNPTSSYVWRNIIPHVAPTHRCIAPDLIGMGKSDKPDLGYFFDDHVRFMDAFIEALGLEEVVLVIHDWGSALGFHWAKRNPERVKGIAFMEFIRPIPTWDEWPEFARRTFQAFRTTDVGRKLIIDQNVFIEGTLPMGVVRPLTEVEMDHYREPFLNPVDREPLWRFPNELPIAGEPANIVALVEEYMDWLHQSPVPKLLFWGTPGVLIPPAEAARLAKSLPNCKAVDIGPGLNLLQEDNPDLIGSEIARWLSTLEISG

SEQ ID NO: 1942 - protein, 277 aa, Synthetic construct
MFHYVDVGPRDGTPVLFLHGNPTSSYVWRNIIPHVAPTHRCIAPDLIGMGKSDKPDLGYFFDDHVRFMDAFIEALGLEEVVLVIHDWGSALGFHWAKRNPERVKGIAFMEFIRPIPTWDEWPEFARPTFQAFRTTDVGRKLIIDQNVFIEGTLPMGVVRPLTEVEMDHYREPFLNPVDREPLWRFPNELPIAGEPANIVALVEEYMDWLHQSPVPKLLFWGTPGVLIPPAEAARLAKSLPNCKAVDIGPGLNLLQEDNPDLIGSEIARWLSTLEISG

SEQ ID NO: 1943 - protein, 277 aa, Synthetic construct
MFHYVDVGPRDGTPVLFLHGNPTSSYVWRNIIPHVAPTHRCIAPDLIGMGKSDKPDLGYFFDDHVRFMDAFIEALGLEEVVLVIHDWGSALGFHWAKRNPERVKGIAFMEFIRPIPTWDEWPEFARSTFQAFRTTDVGRKLIIDQNVFIEGTLPMGVVRPLTEVEMDHYREPFLNPVDREPLWRFPNELPIAGEPANIVALVEEYMDWLHQSPVPKLLFWGTPGVLIPPAEAARLAKSLPNCKAVDIGPGLNLLQEDNPDLIGSEIARWLSTLEISG

SEQ ID NO: 1944 - protein, 277 aa, Synthetic construct
MFHYVDVGPRDGTPVLFLHGNPTSSYVWRNIIPHVAPTHRCIAPDLIGMGKSDKPDLGYFFDDHVRFMDAFIEALGLEEVVLVIHDWGSALGFHWAKRNPERVKGIAFMEFIRPIPTWDEWPEFARERFQAFRTTDVGRKLIIDQNVFIEGTLPMGVVRPLTEVEMDHYREPFLNPVDREPLWRFPNELPIAGEPANIVALVEEYMDWLHQSPVPKLLFWGTPGVLIPPAEAARLAKSLPNCKAVDIGPGLNLLQEDNPDLIGSEIARWLSTLEISG

SEQ ID NO: 1945 - protein, 277 aa, Synthetic construct
MFHYVDVGPRDGTPVLFLHGNPTSSYVWRNIIPHVAPTHRCIAPDLIGMGKSDKPDLGYFFDDHVRFMDAFIEALGLEEVVLVIHDWGSALGFHWAKRNPERVKGIAFMEFIRPIPTWDEWPEFARELFQAFRTTDVGRKLIIDQNVFIEGTLPMGVVRPLTEVEMDHYREPFLNPVDREPLWRFPNELPIAGEPANIVALVEEYMDWLHQSPVPKLLFWGTPGVLIPPAEAARLAKSLPNCKAVDIGPGLNLLQEDNPDLIGSEIARWLSTLEISG

SEQ ID NO: 1946 - protein, 277 aa, Synthetic construct
MFHYVDVGPRDGTPVLFLHGNPTSSYVWRNIIPHVAPTHRCIAPDLIGMGKSDKPDLGYFFDDHVRFMDAFIEALGLEEVVLVIHDWGSALGFHWAKRNPERVKGIAFMEFIRPIPTWDEWPEFAREAFQAFRTTDVGRKLIIDQNVFIEGTLPMGVVRPLTEVEMDHYREPFLNPVDREPLWRFPNELPIAGEPANIVALVEEYMDWLHQSPVPKLLFWGTPGVLIPPAEAARLAKSLPNCKAVDIGPGLNLLQEDNPDLIGSEIARWLSTLEISG

SEQ ID NO: 1947 - protein, 277 aa, Synthetic construct
MFHYVDVGPRDGTPVLFLHGNPTSSYVWRNIIPHVAPTHRCIAPDLIGMGKSDKPDLGYFFDDHVRFMDAFIEALGLEEVVLVIHDWGSALGFHWAKRNPERVKGIAFMEFIRPIPTWDEWPEFAREIFQAFRTTDVGRKLIIDQNVFIEGTLPMGVVRPLTEVEMDHYREPFLNPVDREPLWRFPNELPIAGEPANIVALVEEYMDWLHQSPVPKLLFWGTPGVLIPPAEAARLAKSLPNCKAVDIGPGLNLLQEDNPDLIGSEIARWLSTLEISG

SEQ ID NO: 1948 - protein, 277 aa, Synthetic construct
MFHYVDVGPRDGTPVLFLHGNPTSSYVWRNIIPHVAPTHRCIAPDLIGMGKSDKPDLGYFFDDHVRFMDAFIEALGLEEVVLVIHDWGSALGFHWAKRNPERVKGIAFMEFIRPIPTWDEWPEFAREVFQAFRTTDVGRKLIIDQNVFIEGTLPMGVVRPLTEVEMDHYREPFLNPVDREPLWRFPNELPIAGEPANIVALVEEYMDWLHQSPVPKLLFWGTPGVLIPPAEAARLAKSLPNCKAVDIGPGLNLLQEDNPDLIGSEIARWLSTLEISG

SEQ ID NO: 1949 - protein, 277 aa, Synthetic construct
MFHYVDVGPRDGTPVLFLHGNPTSSYVWRNIIPHVAPTHRCIAPDLIGMGKSDKPDLGYFFDDHVRFMDAFIEALGLEEVVLVIHDWGSALGFHWAKRNPERVKGIAFMEFIRPIPTWDEWPEFAREMFQAFRTTDVGRKLIIDQNVFIEGTLPMGVVRPLTEVEMDHYREPFLNPVDREPLWRFPNELPIAGEPANIVALVEEYMDWLHQSPVPKLLFWGTPGVLIPPAEAARLAKSLPNCKAVDIGPGLNLLQEDNPDLIGSEIARWLSTLEISG

SEQ ID NO: 1950 - protein, 277 aa, Synthetic construct
MFHYVDVGPRDGTPVLFLHGNPTSSYVWRNIIPHVAPTHRCIAPDLIGMGKSDKPDLGYFFDDHVRFMDAFIEALGLEEVVLVIHDWGSALGFHWAKRNPERVKGIAFMEFIRPIPTWDEWPEFARETLQAFRTTDVGRKLIIDQNVFIEGTLPMGVVRPLTEVEMDHYREPFLNPVDREPLWRFPNELPIAGEPANIVALVEEYMDWLHQSPVPKLLFWGTPGVLIPPAEAARLAKSLPNCKAVDIGPGLNLLQEDNPDLIGSEIARWLSTLEISG

SEQ ID NO: 1951 - protein, 277 aa, Synthetic construct
MFHYVDVGPRDGTPVLFLHGNPTSSYVWRNIIPHVAPTHRCIAPDLIGMGKSDKPDLGYFFDDHVRFMDAFIEALGLEEVVLVIHDWGSALGFHWAKRNPERVKGIAFMEFIRPIPTWDEWPEFARETYQAFRTTDVGRKLIIDQNVFIEGTLPMGVVRPLTEVEMDHYREPFLNPVDREPLWRFPNELPIAGEPANIVALVEEYMDWLHQSPVPKLLFWGTPGVLIPPAEAARLAKSLPNCKAVDIGPGLNLLQEDNPDLIGSEIARWLSTLEISG

SEQ ID NO: 1952 - protein, 277 aa, Synthetic construct
MFHYVDVGPRDGTPVLFLHGNPTSSYVWRNIIPHVAPTHRCIAPDLIGMGKSDKPDLGYFFDDHVRFMDAFIEALGLEEVVLVIHDWGSALGFHWAKRNPERVKGIAFMEFIRPIPTWDEWPEFARETIQAFRTTDVGRKLIIDQNVFIEGTLPMGVVRPLTEVEMDHYREPFLNPVDREPLWRFPNELPIAGEPANIVALVEEYMDWLHQSPVPKLLFWGTPGVLIPPAEAARLAKSLPNCKAVDIGPGLNLLQEDNPDLIGSEIARWLSTLEISG

SEQ ID NO: 1953 - protein, 277 aa, Synthetic construct
MFHYVDVGPRDGTPVLFLHGNPTSSYVWRNIIPHVAPTHRCIAPDLIGMGKSDKPDLGYFFDDHVRFMDAFIEALGLEEVVLVIHDWGSALGFHWAKRNPERVKGIAFMEFIRPIPTWDEWPEFARETMQAFRTTDVGRKLIIDQNVFIEGTLPMGVVRPLTEVEMDHYREPFLNPVDREPLWRFPNELPIAGEPANIVALVEEYMDWLHQSPVPKLLFWGTPGVLIPPAEAARLAKSLPNCKAVDIGPGLNLLQEDNPDLIGSEIARWLSTLEISG

SEQ ID NO: 1954 - protein, 277 aa, Synthetic construct
MFHYVDVGPRDGTPVLFLHGNPTSSYVWRNIIPHVAPTHRCIAPDLIGMGKSDKPDLGYFFDDHVRFMDAFIEALGLEEVVLVIHDWGSALGFHWAKRNPERVKGIAFMEFIRPIPTWDEWPEFARETVQAFRTTDVGRKLIIDQNVFIEGTLPMGVVRPLTEVEMDHYREPFLNPVDREPLWRFPNELPIAGEPANIVALVEEYMDWLHQSPVPKLLFWGTPGVLIPPAEAARLAKSLPNCKAVDIGPGLNLLQEDNPDLIGSEIARWLSTLEISG

SEQ ID NO: 1955 - protein, 277 aa, Synthetic construct
MFHYVDVGPRDGTPVLFLHGNPTSSYVWRNIIPHVAPTHRCIAPDLIGMGKSDKPDLGYFFDDHVRFMDAFIEALGLEEVVLVIHDWGSALGFHWAKRNPERVKGIAFMEFIRPIPTWDEWPEFARETWQAFRTTDVGRKLIIDQNVFIEGTLPMGVVRPLTEVEMDHYREPFLNPVDREPLWRFPNELPIAGEPANIVALVEEYMDWLHQSPVPKLLFWGTPGVLIPPAEAARLAKSLPNCKAVDIGPGLNLLQEDNPDLIGSEIARWLSTLEISG

SEQ ID NO: 1956 - protein, 277 aa, Synthetic construct
MFHYVDVGPRDGTPVLFLHGNPTSSYVWRNIIPHVAPTHRCIAPDLIGMGKSDKPDLGYFFDDHVRFMDAFIEALGLEEVVLVIHDWGSALGFHWAKRNPERVKGIAFMEFIRPIPTWDEWPEFARETFRAFRTTDVGRKLIIDQNVFIEGTLPMGVVRPLTEVEMDHYREPFLNPVDREPLWRFPNELPIAGEPANIVALVEEYMDWLHQSPVPKLLFWGTPGVLIPPAEAARLAKSLPNCKAVDIGPGLNLLQEDNPDLIGSEIARWLSTLEISG

SEQ ID NO: 1957 - protein, 277 aa, Synthetic construct
MFHYVDVGPRDGTPVLFLHGNPTSSYVWRNIIPHVAPTHRCIAPDLIGMGKSDKPDLGYFFDDHVRFMDAFIEALGLEEVVLVIHDWGSALGFHWAKRNPERVKGIAFMEFIRPIPTWDEWPEFARETFKAFRTTDVGRKLIIDQNVFIEGTLPMGVVRPLTEVEMDHYREPFLNPVDREPLWRFPNELPIAGEPANIVALVEEYMDWLHQSPVPKLLFWGTPGVLIPPAEAARLAKSLPNCKAVDIGPGLNLLQEDNPDLIGSEIARWLSTLEISG

SEQ ID NO: 1958 - protein, 277 aa, Synthetic construct
MFHYVDVGPRDGTPVLFLHGNPTSSYVWRNIIPHVAPTHRCIAPDLIGMGKSDKPDLGYFFDDHVRFMDAFIEALGLEEVVLVIHDWGSALGFHWAKRNPERVKGIAFMEFIRPIPTWDEWPEFARETFAAFRTTDVGRKLIIDQNVFIEGTLPMGVVRPLTEVEMDHYREPFLNPVDREPLWRFPNELPIAGEPANIVALVEEYMDWLHQSPVPKLLFWGTPGVLIPPAEAARLAKSLPNCKAVDIGPGLNLLQEDNPDLIGSEIARWLSTLEISG

SEQ ID NO: 1959 - protein, 277 aa, Synthetic construct
MFHYVDVGPRDGTPVLFLHGNPTSSYVWRNIIPHVAPTHRCIAPDLIGMGKSDKPDLGYFFDDHVRFMDAFIEALGLEEVVLVIHDWGSALGFHWAKRNPERVKGIAFMEFIRPIPTWDEWPEFARETFEAFRTTDVGRKLIIDQNVFIEGTLPMGVVRPLTEVEMDHYREPFLNPVDREPLWRFPNELPIAGEPANIVALVEEYMDWLHQSPVPKLLFWGTPGVLIPPAEAARLAKSLPNCKAVDIGPGLNLLQEDNPDLIGSEIARWLSTLEISG

SEQ ID NO: 1960 - protein, 277 aa, Synthetic construct
MFHYVDVGPRDGTPVLFLHGNPTSSYVWRNIIPHVAPTHRCIAPDLIGMGKSDKPDLGYFFDDHVRFMDAFIEALGLEEVVLVIHDWGSALGFHWAKRNPERVKGIAFMEFIRPIPTWDEWPEFARETFLAFRTTDVGRKLIIDQNVFIEGTLPMGVVRPLTEVEMDHYREPFLNPVDREPLWRFPNELPIAGEPANIVALVEEYMDWLHQSPVPKLLFWGTPGVLIPPAEAARLAKSLPNCKAVDIGPGLNLLQEDNPDLIGSEIARWLSTLEISG

SEQ ID NO: 1961 - protein, 277 aa, Synthetic construct
MFHYVDVGPRDGTPVLFLHGNPTSSYVWRNIIPHVAPTHRCIAPDLIGMGKSDKPDLGYFFDDHVRFMDAFIEALGLEEVVLVIHDWGSALGFHWAKRNPERVKGIAFMEFIRPIPTWDEWPEFARETFTAFRTTDVGRKLIIDQNVFIEGTLPMGVVRPLTEVEMDHYREPFLNPVDREPLWRFPNELPIAGEPANIVALVEEYMDWLHQSPVPKLLFWGTPGVLIPPAEAARLAKSLPNCKAVDIGPGLNLLQEDNPDLIGSEIARWLSTLEISG

SEQ ID NO: 1962 - protein, 277 aa, Synthetic construct
MFHYVDVGPRDGTPVLFLHGNPTSSYVWRNIIPHVAPTHRCIAPDLIGMGKSDKPDLGYFFDDHVRFMDAFIEALGLEEVVLVIHDWGSALGFHWAKRNPERVKGIAFMEFIRPIPTWDEWPEFARETFQRFRTTDVGRKLIIDQNVFIEGTLPMGVVRPLTEVEMDHYREPFLNPVDREPLWRFPNELPIAGEPANIVALVEEYMDWLHQSPVPKLLFWGTPGVLIPPAEAARLAKSLPNCKAVDIGPGLNLLQEDNPDLIGSEIARWLSTLEISG

SEQ ID NO: 1963 - protein, 277 aa, Synthetic construct
MFHYVDVGPRDGTPVLFLHGNPTSSYVWRNIIPHVAPTHRCIAPDLIGMGKSDKPDLGYFFDDHVRFMDAFIEALGLEEVVLVIHDWGSALGFHWAKRNPERVKGIAFMEFIRPIPTWDEWPEFARETFQGFRTTDVGRKLIIDQNVFIEGTLPMGVVRPLTEVEMDHYREPFLNPVDREPLWRFPNELPIAGEPANIVALVEEYMDWLHQSPVPKLLFWGTPGVLIPPAEAARLAKSLPNCKAVDIGPGLNLLQEDNPDLIGSEIARWLSTLEISG

SEQ ID NO: 1964 - protein, 277 aa, Synthetic construct
MFHYVDVGPRDGTPVLFLHGNPTSSYVWRNIIPHVAPTHRCIAPDLIGMGKSDKPDLGYFFDDHVRFMDAFIEALGLEEVVLVIHDWGSALGFHWAKRNPERVKGIAFMEFIRPIPTWDEWPEFARETFQSFRTTDVGRKLIIDQNVFIEGTLPMGVVRPLTEVEMDHYREPFLNPVDREPLWRFPNELPIAGEPANIVALVEEYMDWLHQSPVPKLLFWGTPGVLIPPAEAARLAKSLPNCKAVDIGPGLNLLQEDNPDLIGSEIARWLSTLEISG

SEQ ID NO: 1965 - protein, 277 aa, Synthetic construct
MFHYVDVGPRDGTPVLFLHGNPTSSYVWRNIIPHVAPTHRCIAPDLIGMGKSDKPDLGYFFDDHVRFMDAFIEALGLEEVVLVIHDWGSALGFHWAKRNPERVKGIAFMEFIRPIPTWDEWPEFARETFQKFRTTDVGRKLIIDQNVFIEGTLPMGVVRPLTEVEMDHYREPFLNPVDREPLWRFPNELPIAGEPANIVALVEEYMDWLHQSPVPKLLFWGTPGVLIPPAEAARLAKSLPNCKAVDIGPGLNLLQEDNPDLIGSEIARWLSTLEISG

SEQ ID NO: 1966 - protein, 277 aa, Synthetic construct
MFHYVDVGPRDGTPVLFLHGNPTSSYVWRNIIPHVAPTHRCIAPDLIGMGKSDKPDLGYFFDDHVRFMDAFIEALGLEEVVLVIHDWGSALGFHWAKRNPERVKGIAFMEFIRPIPTWDEWPEFARETFQQFRTTDVGRKLIIDQNVFIEGTLPMGVVRPLTEVEMDHYREPFLNPVDREPLWRFPNELPIAGEPANIVALVEEYMDWLHQSPVPKLLFWGTPGVLIPPAEAARLAKSLPNCKAVDIGPGLNLLQEDNPDLIGSEIARWLSTLEISG

SEQ ID NO: 1967 - protein, 277 aa, Synthetic construct
MFHYVDVGPRDGTPVLFLHGNPTSSYVWRNIIPHVAPTHRCIAPDLIGMGKSDKPDLGYFFDDHVRFMDAFIEALGLEEVVLVIHDWGSALGFHWAKRNPERVKGIAFMEFIRPIPTWDEWPEFARETFQTFRTTDVGRKLIIDQNVFIEGTLPMGVVRPLTEVEMDHYREPFLNPVDREPLWRFPNELPIAGEPANIVALVEEYMDWLHQSPVPKLLFWGTPGVLIPPAEAARLAKSLPNCKAVDIGPGLNLLQEDNPDLIGSEIARWLSTLEISG

SEQ ID NO: 1968 - protein, 277 aa, Synthetic construct
MFHYVDVGPRDGTPVLFLHGNPTSSYVWRNIIPHVAPTHRCIAPDLIGMGKSDKPDLGYFFDDHVRFMDAFIEALGLEEVVLVIHDWGSALGFHWAKRNPERVKGIAFMEFIRPIPTWDEWPEFARETFQALRTTDVGRKLIIDQNVFIEGTLPMGVVRPLTEVEMDHYREPFLNPVDREPLWRFPNELPIAGEPANIVALVEEYMDWLHQSPVPKLLFWGTPGVLIPPAEAARLAKSLPNCKAVDIGPGLNLLQEDNPDLIGSEIARWLSTLEISG

SEQ ID NO: 1969 - protein, 277 aa, Synthetic construct
MFHYVDVGPRDGTPVLFLHGNPTSSYVWRNIIPHVAPTHRCIAPDLIGMGKSDKPDLGYFFDDHVRFMDAFIEALGLEEVVLVIHDWGSALGFHWAKRNPERVKGIAFMEFIRPIPTWDEWPEFARETFQAMRTTDVGRKLIIDQNVFIEGTLPMGVVRPLTEVEMDHYREPFLNPVDREPLWRFPNELPIAGEPANIVALVEEYMDWLHQSPVPKLLFWGTPGVLIPPAEAARLAKSLPNCKAVDIGPGLNLLQEDNPDLIGSEIARWLSTLEISG

SEQ ID NO: 1970 - protein, 277 aa, Synthetic construct
MFHYVDVGPRDGTPVLFLHGNPTSSYVWRNIIPHVAPTHRCIAPDLIGMGKSDKPDLGYFFDDHVRFMDAFIEALGLEEVVLVIHDWGSALGFHWAKRNPERVKGIAFMEFIRPIPTWDEWPEFARETFQAIRTTDVGRKLIIDQNVFIEGTLPMGVVRPLTEVEMDHYREPFLNPVDREPLWRFPNELPIAGEPANIVALVEEYMDWLHQSPVPKLLFWGTPGVLIPPAEAARLAKSLPNCKAVDIGPGLNLLQEDNPDLIGSEIARWLSTLEISG

SEQ ID NO: 1971 - protein, 277 aa, Synthetic construct
MFHYVDVGPRDGTPVLFLHGNPTSSYVWRNIIPHVAPTHRCIAPDLIGMGKSDKPDLGYFFDDHVRFMDAFIEALGLEEVVLVIHDWGSALGFHWAKRNPERVKGIAFMEFIRPIPTWDEWPEFARETFQAYRTTDVGRKLIIDQNVFIEGTLPMGVVRPLTEVEMDHYREPFLNPVDREPLWRFPNELPIAGEPANIVALVEEYMDWLHQSPVPKLLFWGTPGVLIPPAEAARLAKSLPNCKAVDIGPGLNLLQEDNPDLIGSEIARWLSTLEISG

SEQ ID NO: 1972 - protein, 277 aa, Synthetic construct
MFHYVDVGPRDGTPVLFLHGNPTSSYVWRNIIPHVAPTHRCIAPDLIGMGKSDKPDLGYFFDDHVRFMDAFIEALGLEEVVLVIHDWGSALGFHWAKRNPERVKGIAFMEFIRPIPTWDEWPEFARETFQAVRTTDVGRKLIIDQNVFIEGTLPMGVVRPLTEVEMDHYREPFLNPVDREPLWRFPNELPIAGEPANIVALVEEYMDWLHQSPVPKLLFWGTPGVLIPPAEAARLAKSLPNCKAVDIGPGLNLLQEDNPDLIGSEIARWLSTLEISG

SEQ ID NO: 1973 - protein, 277 aa, Synthetic construct
MFHYVDVGPRDGTPVLFLHGNPTSSYVWRNIIPHVAPTHRCIAPDLIGMGKSDKPDLGYFFDDHVRFMDAFIEALGLEEVVLVIHDWGSALGFHWAKRNPERVKGIAFMEFIRPIPTWDEWPEFARETFQAARTTDVGRKLIIDQNVFIEGTLPMGVVRPLTEVEMDHYREPFLNPVDREPLWRFPNELPIAGEPANIVALVEEYMDWLHQSPVPKLLFWGTPGVLIPPAEAARLAKSLPNCKAVDIGPGLNLLQEDNPDLIGSEIARWLSTLEISG

SEQ ID NO: 1974 - protein, 277 aa, Synthetic construct
MFHYVDVGPRDGTPVLFLHGNPTSSYVWRNIIPHVAPTHRCIAPDLIGMGKSDKPDLGYFFDDHVRFMDAFIEALGLEEVVLVIHDWGSALGFHWAKRNPERVKGIAFMEFIRPIPTWDEWPEFARETFQAFKTTDVGRKLIIDQNVFIEGTLPMGVVRPLTEVEMDHYREPFLNPVDREPLWRFPNELPIAGEPANIVALVEEYMDWLHQSPVPKLLFWGTPGVLIPPAEAARLAKSLPNCKAVDIGPGLNLLQEDNPDLIGSEIARWLSTLEISG

SEQ ID NO: 1975 - protein, 277 aa, Synthetic construct
MFHYVDVGPRDGTPVLFLHGNPTSSYVWRNIIPHVAPTHRCIAPDLIGMGKSDKPDLGYFFDDHVRFMDAFIEALGLEEVVLVIHDWGSALGFHWAKRNPERVKGIAFMEFIRPIPTWDEWPEFARETFQAFQTTDVGRKLIIDQNVFIEGTLPMGVVRPLTEVEMDHYREPFLNPVDREPLWRFPNELPIAGEPANIVALVEEYMDWLHQSPVPKLLFWGTPGVLIPPAEAARLAKSLPNCKAVDIGPGLNLLQEDNPDLIGSEIARWLSTLEISG

SEQ ID NO: 1976 - protein, 277 aa, Synthetic construct
MFHYVDVGPRDGTPVLFLHGNPTSSYVWRNIIPHVAPTHRCIAPDLIGMGKSDKPDLGYFFDDHVRFMDAFIEALGLEEVVLVIHDWGSALGFHWAKRNPERVKGIAFMEFIRPIPTWDEWPEFARETFQAFLTTDVGRKLIIDQNVFIEGTLPMGVVRPLTEVEMDHYREPFLNPVDREPLWRFPNELPIAGEPANIVALVEEYMDWLHQSPVPKLLFWGTPGVLIPPAEAARLAKSLPNCKAVDIGPGLNLLQEDNPDLIGSEIARWLSTLEISG

SEQ ID NO: 1977 - protein, 277 aa, Synthetic construct
MFHYVDVGPRDGTPVLFLHGNPTSSYVWRNIIPHVAPTHRCIAPDLIGMGKSDKPDLGYFFDDHVRFMDAFIEALGLEEVVLVIHDWGSALGFHWAKRNPERVKGIAFMEFIRPIPTWDEWPEFARETFQAFATTDVGRKLIIDQNVFIEGTLPMGVVRPLTEVEMDHYREPFLNPVDREPLWRFPNELPIAGEPANIVALVEEYMDWLHQSPVPKLLFWGTPGVLIPPAEAARLAKSLPNCKAVDIGPGLNLLQEDNPDLIGSEIARWLSTLEISG

SEQ ID NO: 1978 - protein, 277 aa, Synthetic construct
MFHYVDVGPRDGTPVLFLHGNPTSSYVWRNIIPHVAPTHRCIAPDLIGMGKSDKPDLGYFFDDHVRFMDAFIEALGLEEVVLVIHDWGSALGFHWAKRNPERVKGIAFMEFIRPIPTWDEWPEFARETFQAFSTTDVGRKLIIDQNVFIEGTLPMGVVRPLTEVEMDHYREPFLNPVDREPLWRFPNELPIAGEPANIVALVEEYMDWLHQSPVPKLLFWGTPGVLIPPAEAARLAKSLPNCKAVDIGPGLNLLQEDNPDLIGSEIARWLSTLEISG

SEQ ID NO: 1979 - protein, 277 aa, Synthetic construct
MFHYVDVGPRDGTPVLFLHGNPTSSYVWRNIIPHVAPTHRCIAPDLIGMGKSDKPDLGYFFDDHVRFMDAFIEALGLEEVVLVIHDWGSALGFHWAKRNPERVKGIAFMEFIRPIPTWDEWPEFARETFQAFHTTDVGRKLIIDQNVFIEGTLPMGVVRPLTEVEMDHYREPFLNPVDREPLWRFPNELPIAGEPANIVALVEEYMDWLHQSPVPKLLFWGTPGVLIPPAEAARLAKSLPNCKAVDIGPGLNLLQEDNPDLIGSEIARWLSTLEISG

SEQ ID NO: 1980 - protein, 277 aa, Synthetic construct
MFHYVDVGPRDGTPVLFLHGNPTSSYVWRNIIPHVAPTHRCIAPDLIGMGKSDKPDLGYFFDDHVRFMDAFIEALGLEEVVLVIHDWGSALGFHWAKRNPERVKGIAFMEFIRPIPTWDEWPEFARETFQAFRSTDVGRKLIIDQNVFIEGTLPMGVVRPLTEVEMDHYREPFLNPVDREPLWRFPNELPIAGEPANIVALVEEYMDWLHQSPVPKLLFWGTPGVLIPPAEAARLAKSLPNCKAVDIGPGLNLLQEDNPDLIGSEIARWLSTLEISG

SEQ ID NO: 1981 - protein, 277 aa, Synthetic construct
MFHYVDVGPRDGTPVLFLHGNPTSSYVWRNIIPHVAPTHRCIAPDLIGMGKSDKPDLGYFFDDHVRFMDAFIEALGLEEVVLVIHDWGSALGFHWAKRNPERVKGIAFMEFIRPIPTWDEWPEFARETFQAFRDTDVGRKLIIDQNVFIEGTLPMGVVRPLTEVEMDHYREPFLNPVDREPLWRFPNELPIAGEPANIVALVEEYMDWLHQSPVPKLLFWGTPGVLIPPAEAARLAKSLPNCKAVDIGPGLNLLQEDNPDLIGSEIARWLSTLEISG

SEQ ID NO: 1982 - protein, 277 aa, Synthetic construct
MFHYVDVGPRDGTPVLFLHGNPTSSYVWRNIIPHVAPTHRCIAPDLIGMGKSDKPDLGYFFDDHVRFMDAFIEALGLEEVVLVIHDWGSALGFHWAKRNPERVKGIAFMEFIRPIPTWDEWPEFARETFQAFRETDVGRKLIIDQNVFIEGTLPMGVVRPLTEVEMDHYREPFLNPVDREPLWRFPNELPIAGEPANIVALVEEYMDWLHQSPVPKLLFWGTPGVLIPPAEAARLAKSLPNCKAVDIGPGLNLLQEDNPDLIGSEIARWLSTLEISG

SEQ ID NO: 1983 - protein, 277 aa, Synthetic construct
MFHYVDVGPRDGTPVLFLHGNPTSSYVWRNIIPHVAPTHRCIAPDLIGMGKSDKPDLGYFFDDHVRFMDAFIEALGLEEVVLVIHDWGSALGFHWAKRNPERVKGIAFMEFIRPIPTWDEWPEFARETFQAFRGTDVGRKLIIDQNVFIEGTLPMGVVRPLTEVEMDHYREPFLNPVDREPLWRFPNELPIAGEPANIVALVEEYMDWLHQSPVPKLLFWGTPGVLIPPAEAARLAKSLPNCKAVDIGPGLNLLQEDNPDLIGSEIARWLSTLEISG

SEQ ID NO: 1984 - protein, 277 aa, Synthetic construct
MFHYVDVGPRDGTPVLFLHGNPTSSYVWRNIIPHVAPTHRCIAPDLIGMGKSDKPDLGYFFDDHVRFMDAFIEALGLEEVVLVIHDWGSALGFHWAKRNPERVKGIAFMEFIRPIPTWDEWPEFARETFQAFRATDVGRKLIIDQNVFIEGTLPMGVVRPLTEVEMDHYREPFLNPVDREPLWRFPNELPIAGEPANIVALVEEYMDWLHQSPVPKLLFWGTPGVLIPPAEAARLAKSLPNCKAVDIGPGLNLLQEDNPDLIGSEIARWLSTLEISG

SEQ ID NO: 1985 - protein, 277 aa, Synthetic construct
MFHYVDVGPRDGTPVLFLHGNPTSSYVWRNIIPHVAPTHRCIAPDLIGMGKSDKPDLGYFFDDHVRFMDAFIEALGLEEVVLVIHDWGSALGFHWAKRNPERVKGIAFMEFIRPIPTWDEWPEFARETFQAFRNTDVGRKLIIDQNVFIEGTLPMGVVRPLTEVEMDHYREPFLNPVDREPLWRFPNELPIAGEPANIVALVEEYMDWLHQSPVPKLLFWGTPGVLIPPAEAARLAKSLPNCKAVDIGPGLNLLQEDNPDLIGSEIARWLSTLEISG

SEQ ID NO: 1986 - protein, 277 aa, Synthetic construct
MFHYVDVGPRDGTPVLFLHGNPTSSYVWRNIIPHVAPTHRCIAPDLIGMGKSDKPDLGYFFDDHVRFMDAFIEALGLEEVVLVIHDWGSALGFHWAKRNPERVKGIAFMEFIRPIPTWDEWPEFARETFQAFRTPDVGRKLIIDQNVFIEGTLPMGVVRPLTEVEMDHYREPFLNPVDREPLWRFPNELPIAGEPANIVALVEEYMDWLHQSPVPKLLFWGTPGVLIPPAEAARLAKSLPNCKAVDIGPGLNLLQEDNPDLIGSEIARWLSTLEISG

SEQ ID NO: 1987 - protein, 277 aa, Synthetic construct
MFHYVDVGPRDGTPVLFLHGNPTSSYVWRNIIPHVAPTHRCIAPDLIGMGKSDKPDLGYFFDDHVRFMDAFIEALGLEEVVLVIHDWGSALGFHWAKRNPERVKGIAFMEFIRPIPTWDEWPEFARETFQAFRTEDVGRKLIIDQNVFIEGTLPMGVVRPLTEVEMDHYREPFLNPVDREPLWRFPNELPIAGEPANIVALVEEYMDWLHQSPVPKLLFWGTPGVLIPPAEAARLAKSLPNCKAVDIGPGLNLLQEDNPDLIGSEIARWLSTLEISG

SEQ ID NO: 1988 - protein, 277 aa, Synthetic construct
MFHYVDVGPRDGTPVLFLHGNPTSSYVWRNIIPHVAPTHRCIAPDLIGMGKSDKPDLGYFFDDHVRFMDAFIEALGLEEVVLVIHDWGSALGFHWAKRNPERVKGIAFMEFIRPIPTWDEWPEFARETFQAFRTADVGRKLIIDQNVFIEGTLPMGVVRPLTEVEMDHYREPFLNPVDREPLWRFPNELPIAGEPANIVALVEEYMDWLHQSPVPKLLFWGTPGVLIPPAEAARLAKSLPNCKAVDIGPGLNLLQEDNPDLIGSEIARWLSTLEISG

SEQ ID NO: 1989 - protein, 277 aa, Synthetic construct
MFHYVDVGPRDGTPVLFLHGNPTSSYVWRNIIPHVAPTHRCIAPDLIGMGKSDKPDLGYFFDDHVRFMDAFIEALGLEEVVLVIHDWGSALGFHWAKRNPERVKGIAFMEFIRPIPTWDEWPEFARETFQAFRTSDVGRKLIIDQNVFIEGTLPMGVVRPLTEVEMDHYREPFLNPVDREPLWRFPNELPIAGEPANIVALVEEYMDWLHQSPVPKLLFWGTPGVLIPPAEAARLAKSLPNCKAVDIGPGLNLLQEDNPDLIGSEIARWLSTLEISG

SEQ ID NO: 1990 - protein, 277 aa, Synthetic construct
MFHYVDVGPRDGTPVLFLHGNPTSSYVWRNIIPHVAPTHRCIAPDLIGMGKSDKPDLGYFFDDHVRFMDAFIEALGLEEVVLVIHDWGSALGFHWAKRNPERVKGIAFMEFIRPIPTWDEWPEFARETFQAFRTDDVGRKLIIDQNVFIEGTLPMGVVRPLTEVEMDHYREPFLNPVDREPLWRFPNELPIAGEPANIVALVEEYMDWLHQSPVPKLLFWGTPGVLIPPAEAARLAKSLPNCKAVDIGPGLNLLQEDNPDLIGSEIARWLSTLEISG

SEQ ID NO: 1991 - protein, 277 aa, Synthetic construct
MFHYVDVGPRDGTPVLFLHGNPTSSYVWRNIIPHVAPTHRCIAPDLIGMGKSDKPDLGYFFDDHVRFMDAFIEALGLEEVVLVIHDWGSALGFHWAKRNPERVKGIAFMEFIRPIPTWDEWPEFARETFQAFRTGDVGRKLIIDQNVFIEGTLPMGVVRPLTEVEMDHYREPFLNPVDREPLWRFPNELPIAGEPANIVALVEEYMDWLHQSPVPKLLFWGTPGVLIPPAEAARLAKSLPNCKAVDIGPGLNLLQEDNPDLIGSEIARWLSTLEISG

SEQ ID NO: 1992 - protein, 277 aa, Synthetic construct
MFHYVDVGPRDGTPVLFLHGNPTSSYVWRNIIPHVAPTHRCIAPDLIGMGKSDKPDLGYFFDDHVRFMDAFIEALGLEEVVLVIHDWGSALGFHWAKRNPERVKGIAFMEFIRPIPTWDEWPEFARETFQAFRTTEVGRKLIIDQNVFIEGTLPMGVVRPLTEVEMDHYREPFLNPVDREPLWRFPNELPIAGEPANIVALVEEYMDWLHQSPVPKLLFWGTPGVLIPPAEAARLAKSLPNCKAVDIGPGLNLLQEDNPDLIGSEIARWLSTLEISG

SEQ ID NO: 1993 - protein, 277 aa, Synthetic construct
MFHYVDVGPRDGTPVLFLHGNPTSSYVWRNIIPHVAPTHRCIAPDLIGMGKSDKPDLGYFFDDHVRFMDAFIEALGLEEVVLVIHDWGSALGFHWAKRNPERVKGIAFMEFIRPIPTWDEWPEFARETFQAFRTTGVGRKLIIDQNVFIEGTLPMGVVRPLTEVEMDHYREPFLNPVDREPLWRFPNELPIAGEPANIVALVEEYMDWLHQSPVPKLLFWGTPGVLIPPAEAARLAKSLPNCKAVDIGPGLNLLQEDNPDLIGSEIARWLSTLEISG

SEQ ID NO: 1994 - protein, 277 aa, Synthetic construct
MFHYVDVGPRDGTPVLFLHGNPTSSYVWRNIIPHVAPTHRCIAPDLIGMGKSDKPDLGYFFDDHVRFMDAFIEALGLEEVVLVIHDWGSALGFHWAKRNPERVKGIAFMEFIRPIPTWDEWPEFARETFQAFRTTPVGRKLIIDQNVFIEGTLPMGVVRPLTEVEMDHYREPFLNPVDREPLWRFPNELPIAGEPANIVALVEEYMDWLHQSPVPKLLFWGTPGVLIPPAEAARLAKSLPNCKAVDIGPGLNLLQEDNPDLIGSEIARWLSTLEISG

SEQ ID NO: 1995 - protein, 277 aa, Synthetic construct
MFHYVDVGPRDGTPVLFLHGNPTSSYVWRNIIPHVAPTHRCIAPDLIGMGKSDKPDLGYFFDDHVRFMDAFIEALGLEEVVLVIHDWGSALGFHWAKRNPERVKGIAFMEFIRPIPTWDEWPEFARETFQAFRTTAVGRKLIIDQNVFIEGTLPMGVVRPLTEVEMDHYREPFLNPVDREPLWRFPNELPIAGEPANIVALVEEYMDWLHQSPVPKLLFWGTPGVLIPPAEAARLAKSLPNCKAVDIGPGLNLLQEDNPDLIGSEIARWLSTLEISG

SEQ ID NO: 1996 - protein, 277 aa, Synthetic construct
MFHYVDVGPRDGTPVLFLHGNPTSSYVWRNIIPHVAPTHRCIAPDLIGMGKSDKPDLGYFFDDHVRFMDAFIEALGLEEVVLVIHDWGSALGFHWAKRNPERVKGIAFMEFIRPIPTWDEWPEFARETFQAFRTTSVGRKLIIDQNVFIEGTLPMGVVRPLTEVEMDHYREPFLNPVDREPLWRFPNELPIAGEPANIVALVEEYMDWLHQSPVPKLLFWGTPGVLIPPAEAARLAKSLPNCKAVDIGPGLNLLQEDNPDLIGSEIARWLSTLEISG

SEQ ID NO: 1997 - protein, 277 aa, Synthetic construct
MFHYVDVGPRDGTPVLFLHGNPTSSYVWRNIIPHVAPTHRCIAPDLIGMGKSDKPDLGYFFDDHVRFMDAFIEALGLEEVVLVIHDWGSALGFHWAKRNPERVKGIAFMEFIRPIPTWDEWPEFARETFQAFRTTKVGRKLIIDQNVFIEGTLPMGVVRPLTEVEMDHYREPFLNPVDREPLWRFPNELPIAGEPANIVALVEEYMDWLHQSPVPKLLFWGTPGVLIPPAEAARLAKSLPNCKAVDIGPGLNLLQEDNPDLIGSEIARWLSTLEISG

SEQ ID NO: 1998 - protein, 277 aa, Synthetic construct
MFHYVDVGPRDGTPVLFLHGNPTSSYVWRNIIPHVAPTHRCIAPDLIGMGKSDKPDLGYFFDDHVRFMDAFIEALGLEEVVLVIHDWGSALGFHWAKRNPERVKGIAFMEFIRPIPTWDEWPEFARETFQAFRTTDAGRKLIIDQNVFIEGTLPMGVVRPLTEVEMDHYREPFLNPVDREPLWRFPNELPIAGEPANIVALVEEYMDWLHQSPVPKLLFWGTPGVLIPPAEAARLAKSLPNCKAVDIGPGLNLLQEDNPDLIGSEIARWLSTLEISG

SEQ ID NO: 1999 - protein, 277 aa, Synthetic construct
MFHYVDVGPRDGTPVLFLHGNPTSSYVWRNIIPHVAPTHRCIAPDLIGMGKSDKPDLGYFFDDHVRFMDAFIEALGLEEVVLVIHDWGSALGFHWAKRNPERVKGIAFMEFIRPIPTWDEWPEFARETFQAFRTTDEGRKLIIDQNVFIEGTLPMGVVRPLTEVEMDHYREPFLNPVDREPLWRFPNELPIAGEPANIVALVEEYMDWLHQSPVPKLLFWGTPGVLIPPAEAARLAKSLPNCKAVDIGPGLNLLQEDNPDLIGSEIARWLSTLEISG

SEQ ID NO: 2000 - protein, 277 aa, Synthetic construct
MFHYVDVGPRDGTPVLFLHGNPTSSYVWRNIIPHVAPTHRCIAPDLIGMGKSDKPDLGYFFDDHVRFMDAFIEALGLEEVVLVIHDWGSALGFHWAKRNPERVKGIAFMEFIRPIPTWDEWPEFARETFQAFRTTDTGRKLIIDQNVFIEGTLPMGVVRPLTEVEMDHYREPFLNPVDREPLWRFPNELPIAGEPANIVALVEEYMDWLHQSPVPKLLFWGTPGVLIPPAEAARLAKSLPNCKAVDIGPGLNLLQEDNPDLIGSEIARWLSTLEISG

SEQ ID NO: 2001 - protein, 277 aa, Synthetic construct
MFHYVDVGPRDGTPVLFLHGNPTSSYVWRNIIPHVAPTHRCIAPDLIGMGKSDKPDLGYFFDDHVRFMDAFIEALGLEEVVLVIHDWGSALGFHWAKRNPERVKGIAFMEFIRPIPTWDEWPEFARETFQAFRTTDIGRKLIIDQNVFIEGTLPMGVVRPLTEVEMDHYREPFLNPVDREPLWRFPNELPIAGEPANIVALVEEYMDWLHQSPVPKLLFWGTPGVLIPPAEAARLAKSLPNCKAVDIGPGLNLLQEDNPDLIGSEIARWLSTLEISG

SEQ ID NO: 2002 - protein, 277 aa, Synthetic construct
MFHYVDVGPRDGTPVLFLHGNPTSSYVWRNIIPHVAPTHRCIAPDLIGMGKSDKPDLGYFFDDHVRFMDAFIEALGLEEVVLVIHDWGSALGFHWAKRNPERVKGIAFMEFIRPIPTWDEWPEFARETFQAFRTTDGGRKLIIDQNVFIEGTLPMGVVRPLTEVEMDHYREPFLNPVDREPLWRFPNELPIAGEPANIVALVEEYMDWLHQSPVPKLLFWGTPGVLIPPAEAARLAKSLPNCKAVDIGPGLNLLQEDNPDLIGSEIARWLSTLEISG

SEQ ID NO: 2003 - protein, 277 aa, Synthetic construct
MFHYVDVGPRDGTPVLFLHGNPTSSYVWRNIIPHVAPTHRCIAPDLIGMGKSDKPDLGYFFDDHVRFMDAFIEALGLEEVVLVIHDWGSALGFHWAKRNPERVKGIAFMEFIRPIPTWDEWPEFARETFQAFRTTDLGRKLIIDQNVFIEGTLPMGVVRPLTEVEMDHYREPFLNPVDREPLWRFPNELPIAGEPANIVALVEEYMDWLHQSPVPKLLFWGTPGVLIPPAEAARLAKSLPNCKAVDIGPGLNLLQEDNPDLIGSEIARWLSTLEISG

SEQ ID NO: 2004 - protein, 277 aa, Synthetic construct
MFHYVDVGPRDGTPVLFLHGNPTSSYVWRNIIPHVAPTHRCIAPDLIGMGKSDKPDLGYFFDDHVRFMDAFIEALGLEEVVLVIHDWGSALGFHWAKRNPERVKGIAFMEFIRPIPTWDEWPEFARETFQAFRTTDVARKLIIDQNVFIEGTLPMGVVRPLTEVEMDHYREPFLNPVDREPLWRFPNELPIAGEPANIVALVEEYMDWLHQSPVPKLLFWGTPGVLIPPAEAARLAKSLPNCKAVDIGPGLNLLQEDNPDLIGSEIARWLSTLEISG

SEQ ID NO: 2005 - protein, 277 aa, Synthetic construct
MFHYVDVGPRDGTPVLFLHGNPTSSYVWRNIIPHVAPTHRCIAPDLIGMGKSDKPDLGYFFDDHVRFMDAFIEALGLEEVVLVIHDWGSALGFHWAKRNPERVKGIAFMEFIRPIPTWDEWPEFARETFQAFRTTDVSRKLIIDQNVFIEGTLPMGVVRPLTEVEMDHYREPFLNPVDREPLWRFPNELPIAGEPANIVALVEEYMDWLHQSPVPKLLFWGTPGVLIPPAEAARLAKSLPNCKAVDIGPGLNLLQEDNPDLIGSEIARWLSTLEISG

SEQ ID NO: 2006 - protein, 277 aa, Synthetic construct
MFHYVDVGPRDGTPVLFLHGNPTSSYVWRNIIPHVAPTHRCIAPDLIGMGKSDKPDLGYFFDDHVRFMDAFIEALGLEEVVLVIHDWGSALGFHWAKRNPERVKGIAFMEFIRPIPTWDEWPEFARETFQAFRTTDVDRKLIIDQNVFIEGTLPMGVVRPLTEVEMDHYREPFLNPVDREPLWRFPNELPIAGEPANIVALVEEYMDWLHQSPVPKLLFWGTPGVLIPPAEAARLAKSLPNCKAVDIGPGLNLLQEDNPDLIGSEIARWLSTLEISG

SEQ ID NO: 2007 - protein, 277 aa, Synthetic construct
MFHYVDVGPRDGTPVLFLHGNPTSSYVWRNIIPHVAPTHRCIAPDLIGMGKSDKPDLGYFFDDHVRFMDAFIEALGLEEVVLVIHDWGSALGFHWAKRNPERVKGIAFMEFIRPIPTWDEWPEFARETFQAFRTTDVERKLIIDQNVFIEGTLPMGVVRPLTEVEMDHYREPFLNPVDREPLWRFPNELPIAGEPANIVALVEEYMDWLHQSPVPKLLFWGTPGVLIPPAEAARLAKSLPNCKAVDIGPGLNLLQEDNPDLIGSEIARWLSTLEISG

SEQ ID NO: 2008 - protein, 277 aa, Synthetic construct
MFHYVDVGPRDGTPVLFLHGNPTSSYVWRNIIPHVAPTHRCIAPDLIGMGKSDKPDLGYFFDDHVRFMDAFIEALGLEEVVLVIHDWGSALGFHWAKRNPERVKGIAFMEFIRPIPTWDEWPEFARETFQAFRTTDVTRKLIIDQNVFIEGTLPMGVVRPLTEVEMDHYREPFLNPVDREPLWRFPNELPIAGEPANIVALVEEYMDWLHQSPVPKLLFWGTPGVLIPPAEAARLAKSLPNCKAVDIGPGLNLLQEDNPDLIGSEIARWLSTLEISG

SEQ ID NO: 2009 - protein, 277 aa, Synthetic construct
MFHYVDVGPRDGTPVLFLHGNPTSSYVWRNIIPHVAPTHRCIAPDLIGMGKSDKPDLGYFFDDHVRFMDAFIEALGLEEVVLVIHDWGSALGFHWAKRNPERVKGIAFMEFIRPIPTWDEWPEFARETFQAFRTTDVNRKLIIDQNVFIEGTLPMGVVRPLTEVEMDHYREPFLNPVDREPLWRFPNELPIAGEPANIVALVEEYMDWLHQSPVPKLLFWGTPGVLIPPAEAARLAKSLPNCKAVDIGPGLNLLQEDNPDLIGSEIARWLSTLEISG

SEQ ID NO: 2010 - protein, 277 aa, Synthetic construct
MFHYVDVGPRDGTPVLFLHGNPTSSYVWRNIIPHVAPTHRCIAPDLIGMGKSDKPDLGYFFDDHVRFMDAFIEALGLEEVVLVIHDWGSALGFHWAKRNPERVKGIAFMEFIRPIPTWDEWPEFARETFQAFRTTDVGEKLIIDQNVFIEGTLPMGVVRPLTEVEMDHYREPFLNPVDREPLWRFPNELPIAGEPANIVALVEEYMDWLHQSPVPKLLFWGTPGVLIPPAEAARLAKSLPNCKAVDIGPGLNLLQEDNPDLIGSEIARWLSTLEISG

SEQ ID NO: 2011 - protein, 277 aa, Synthetic construct
MFHYVDVGPRDGTPVLFLHGNPTSSYVWRNIIPHVAPTHRCIAPDLIGMGKSDKPDLGYFFDDHVRFMDAFIEALGLEEVVLVIHDWGSALGFHWAKRNPERVKGIAFMEFIRPIPTWDEWPEFARETFQAFRTTDVGQKLIIDQNVFIEGTLPMGVVRPLTEVEMDHYREPFLNPVDREPLWRFPNELPIAGEPANIVALVEEYMDWLHQSPVPKLLFWGTPGVLIPPAEAARLAKSLPNCKAVDIGPGLNLLQEDNPDLIGSEIARWLSTLEISG

SEQ ID NO: 2012 - protein, 277 aa, Synthetic construct
MFHYVDVGPRDGTPVLFLHGNPTSSYVWRNIIPHVAPTHRCIAPDLIGMGKSDKPDLGYFFDDHVRFMDAFIEALGLEEVVLVIHDWGSALGFHWAKRNPERVKGIAFMEFIRPIPTWDEWPEFARETFQAFRTTDVGKKLIIDQNVFIEGTLPMGVVRPLTEVEMDHYREPFLNPVDREPLWRFPNELPIAGEPANIVALVEEYMDWLHQSPVPKLLFWGTPGVLIPPAEAARLAKSLPNCKAVDIGPGLNLLQEDNPDLIGSEIARWLSTLEISG

SEQ ID NO: 2013 - protein, 277 aa, Synthetic construct
MFHYVDVGPRDGTPVLFLHGNPTSSYVWRNIIPHVAPTHRCIAPDLIGMGKSDKPDLGYFFDDHVRFMDAFIEALGLEEVVLVIHDWGSALGFHWAKRNPERVKGIAFMEFIRPIPTWDEWPEFARETFQAFRTTDVGAKLIIDQNVFIEGTLPMGVVRPLTEVEMDHYREPFLNPVDREPLWRFPNELPIAGEPANIVALVEEYMDWLHQSPVPKLLFWGTPGVLIPPAEAARLAKSLPNCKAVDIGPGLNLLQEDNPDLIGSEIARWLSTLEISG

SEQ ID NO: 2014 - protein, 277 aa, Synthetic construct
MFHYVDVGPRDGTPVLFLHGNPTSSYVWRNIIPHVAPTHRCIAPDLIGMGKSDKPDLGYFFDDHVRFMDAFIEALGLEEVVLVIHDWGSALGFHWAKRNPERVKGIAFMEFIRPIPTWDEWPEFARETFQAFRTTDVGDKLIIDQNVFIEGTLPMGVVRPLTEVEMDHYREPFLNPVDREPLWRFPNELPIAGEPANIVALVEEYMDWLHQSPVPKLLFWGTPGVLIPPAEAARLAKSLPNCKAVDIGPGLNLLQEDNPDLIGSEIARWLSTLEISG

SEQ ID NO: 2015 - protein, 277 aa, Synthetic construct
MFHYVDVGPRDGTPVLFLHGNPTSSYVWRNIIPHVAPTHRCIAPDLIGMGKSDKPDLGYFFDDHVRFMDAFIEALGLEEVVLVIHDWGSALGFHWAKRNPERVKGIAFMEFIRPIPTWDEWPEFARETFQAFRTTDVGHKLIIDQNVFIEGTLPMGVVRPLTEVEMDHYREPFLNPVDREPLWRFPNELPIAGEPANIVALVEEYMDWLHQSPVPKLLFWGTPGVLIPPAEAARLAKSLPNCKAVDIGPGLNLLQEDNPDLIGSEIARWLSTLEISG

SEQ ID NO: 2016 - protein, 277 aa, Synthetic construct
MFHYVDVGPRDGTPVLFLHGNPTSSYVWRNIIPHVAPTHRCIAPDLIGMGKSDKPDLGYFFDDHVRFMDAFIEALGLEEVVLVIHDWGSALGFHWAKRNPERVKGIAFMEFIRPIPTWDEWPEFARETFQAFRTTDVGRELIIDQNVFIEGTLPMGVVRPLTEVEMDHYREPFLNPVDREPLWRFPNELPIAGEPANIVALVEEYMDWLHQSPVPKLLFWGTPGVLIPPAEAARLAKSLPNCKAVDIGPGLNLLQEDNPDLIGSEIARWLSTLEISG

SEQ ID NO: 2017 - protein, 277 aa, Synthetic construct
MFHYVDVGPRDGTPVLFLHGNPTSSYVWRNIIPHVAPTHRCIAPDLIGMGKSDKPDLGYFFDDHVRFMDAFIEALGLEEVVLVIHDWGSALGFHWAKRNPERVKGIAFMEFIRPIPTWDEWPEFARETFQAFRTTDVGRQLIIDQNVFIEGTLPMGVVRPLTEVEMDHYREPFLNPVDREPLWRFPNELPIAGEPANIVALVEEYMDWLHQSPVPKLLFWGTPGVLIPPAEAARLAKSLPNCKAVDIGPGLNLLQEDNPDLIGSEIARWLSTLEISG

SEQ ID NO: 2018 - protein, 277 aa, Synthetic construct
MFHYVDVGPRDGTPVLFLHGNPTSSYVWRNIIPHVAPTHRCIAPDLIGMGKSDKPDLGYFFDDHVRFMDAFIEALGLEEVVLVIHDWGSALGFHWAKRNPERVKGIAFMEFIRPIPTWDEWPEFARETFQAFRTTDVGRDLIIDQNVFIEGTLPMGVVRPLTEVEMDHYREPFLNPVDREPLWRFPNELPIAGEPANIVALVEEYMDWLHQSPVPKLLFWGTPGVLIPPAEAARLAKSLPNCKAVDIGPGLNLLQEDNPDLIGSEIARWLSTLEISG

SEQ ID NO: 2019 - protein, 277 aa, Synthetic construct
MFHYVDVGPRDGTPVLFLHGNPTSSYVWRNIIPHVAPTHRCIAPDLIGMGKSDKPDLGYFFDDHVRFMDAFIEALGLEEVVLVIHDWGSALGFHWAKRNPERVKGIAFMEFIRPIPTWDEWPEFARETFQAFRTTDVGRRLIIDQNVFIEGTLPMGVVRPLTEVEMDHYREPFLNPVDREPLWRFPNELPIAGEPANIVALVEEYMDWLHQSPVPKLLFWGTPGVLIPPAEAARLAKSLPNCKAVDIGPGLNLLQEDNPDLIGSEIARWLSTLEISG

SEQ ID NO: 2020 - protein, 277 aa, Synthetic construct
MFHYVDVGPRDGTPVLFLHGNPTSSYVWRNIIPHVAPTHRCIAPDLIGMGKSDKPDLGYFFDDHVRFMDAFIEALGLEEVVLVIHDWGSALGFHWAKRNPERVKGIAFMEFIRPIPTWDEWPEFARETFQAFRTTDVGRALIIDQNVFIEGTLPMGVVRPLTEVEMDHYREPFLNPVDREPLWRFPNELPIAGEPANIVALVEEYMDWLHQSPVPKLLFWGTPGVLIPPAEAARLAKSLPNCKAVDIGPGLNLLQEDNPDLIGSEIARWLSTLEISG

SEQ ID NO: 2021 - protein, 277 aa, Synthetic construct
MFHYVDVGPRDGTPVLFLHGNPTSSYVWRNIIPHVAPTHRCIAPDLIGMGKSDKPDLGYFFDDHVRFMDAFIEALGLEEVVLVIHDWGSALGFHWAKRNPERVKGIAFMEFIRPIPTWDEWPEFARETFQAFRTTDVGRSLIIDQNVFIEGTLPMGVVRPLTEVEMDHYREPFLNPVDREPLWRFPNELPIAGEPANIVALVEEYMDWLHQSPVPKLLFWGTPGVLIPPAEAARLAKSLPNCKAVDIGPGLNLLQEDNPDLIGSEIARWLSTLEISG

SEQ ID NO: 2022 - protein, 277 aa, Synthetic construct
MFHYVDVGPRDGTPVLFLHGNPTSSYVWRNIIPHVAPTHRCIAPDLIGMGKSDKPDLGYFFDDHVRFMDAFIEALGLEEVVLVIHDWGSALGFHWAKRNPERVKGIAFMEFIRPIPTWDEWPEFARETFQAFRTTDVGRKMIIDQNVFIEGTLPMGVVRPLTEVEMDHYREPFLNPVDREPLWRFPNELPIAGEPANIVALVEEYMDWLHQSPVPKLLFWGTPGVLIPPAEAARLAKSLPNCKAVDIGPGLNLLQEDNPDLIGSEIARWLSTLEISG

SEQ ID NO: 2023 - protein, 277 aa, Synthetic construct
MFHYVDVGPRDGTPVLFLHGNPTSSYVWRNIIPHVAPTHRCIAPDLIGMGKSDKPDLGYFFDDHVRFMDAFIEALGLEEVVLVIHDWGSALGFHWAKRNPERVKGIAFMEFIRPIPTWDEWPEFARETFQAFRTTDVGRKAIIDQNVFIEGTLPMGVVRPLTEVEMDHYREPFLNPVDREPLWRFPNELPIAGEPANIVALVEEYMDWLHQSPVPKLLFWGTPGVLIPPAEAARLAKSLPNCKAVDIGPGLNLLQEDNPDLIGSEIARWLSTLEISG

SEQ ID NO: 2024 - protein, 277 aa, Synthetic construct
MFHYVDVGPRDGTPVLFLHGNPTSSYVWRNIIPHVAPTHRCIAPDLIGMGKSDKPDLGYFFDDHVRFMDAFIEALGLEEVVLVIHDWGSALGFHWAKRNPERVKGIAFMEFIRPIPTWDEWPEFARETFQAFRTTDVGRKIIIDQNVFIEGTLPMGVVRPLTEVEMDHYREPFLNPVDREPLWRFPNELPIAGEPANIVALVEEYMDWLHQSPVPKLLFWGTPGVLIPPAEAARLAKSLPNCKAVDIGPGLNLLQEDNPDLIGSEIARWLSTLEISG

SEQ ID NO: 2025 - protein, 277 aa, Synthetic construct
MFHYVDVGPRDGTPVLFLHGNPTSSYVWRNIIPHVAPTHRCIAPDLIGMGKSDKPDLGYFFDDHVRFMDAFIEALGLEEVVLVIHDWGSALGFHWAKRNPERVKGIAFMEFIRPIPTWDEWPEFARETFQAFRTTDVGRKVIIDQNVFIEGTLPMGVVRPLTEVEMDHYREPFLNPVDREPLWRFPNELPIAGEPANIVALVEEYMDWLHQSPVPKLLFWGTPGVLIPPAEAARLAKSLPNCKAVDIGPGLNLLQEDNPDLIGSEIARWLSTLEISG

SEQ ID NO: 2026 - protein, 277 aa, Synthetic construct
MFHYVDVGPRDGTPVLFLHGNPTSSYVWRNIIPHVAPTHRCIAPDLIGMGKSDKPDLGYFFDDHVRFMDAFIEALGLEEVVLVIHDWGSALGFHWAKRNPERVKGIAFMEFIRPIPTWDEWPEFARETFQAFRTTDVGRKQIIDQNVFIEGTLPMGVVRPLTEVEMDHYREPFLNPVDREPLWRFPNELPIAGEPANIVALVEEYMDWLHQSPVPKLLFWGTPGVLIPPAEAARLAKSLPNCKAVDIGPGLNLLQEDNPDLIGSEIARWLSTLEISG

SEQ ID NO: 2027 - protein, 277 aa, Synthetic construct
MFHYVDVGPRDGTPVLFLHGNPTSSYVWRNIIPHVAPTHRCIAPDLIGMGKSDKPDLGYFFDDHVRFMDAFIEALGLEEVVLVIHDWGSALGFHWAKRNPERVKGIAFMEFIRPIPTWDEWPEFARETFQAFRTTDVGRKTIIDQNVFIEGTLPMGVVRPLTEVEMDHYREPFLNPVDREPLWRFPNELPIAGEPANIVALVEEYMDWLHQSPVPKLLFWGTPGVLIPPAEAARLAKSLPNCKAVDIGPGLNLLQEDNPDLIGSEIARWLSTLEISG

SEQ ID NO: 2028 - protein, 277 aa, Synthetic construct
MFHYVDVGPRDGTPVLFLHGNPTSSYVWRNIIPHVAPTHRCIAPDLIGMGKSDKPDLGYFFDDHVRFMDAFIEALGLEEVVLVIHDWGSALGFHWAKRNPERVKGIAFMEFIRPIPTWDEWPEFARETFQAFRTTDVGRKLVIDQNVFIEGTLPMGVVRPLTEVEMDHYREPFLNPVDREPLWRFPNELPIAGEPANIVALVEEYMDWLHQSPVPKLLFWGTPGVLIPPAEAARLAKSLPNCKAVDIGPGLNLLQEDNPDLIGSEIARWLSTLEISG

SEQ ID NO: 2029 - protein, 277 aa, Synthetic construct
MFHYVDVGPRDGTPVLFLHGNPTSSYVWRNIIPHVAPTHRCIAPDLIGMGKSDKPDLGYFFDDHVRFMDAFIEALGLEEVVLVIHDWGSALGFHWAKRNPERVKGIAFMEFIRPIPTWDEWPEFARETFQAFRTTDVGRKLLIDQNVFIEGTLPMGVVRPLTEVEMDHYREPFLNPVDREPLWRFPNELPIAGEPANIVALVEEYMDWLHQSPVPKLLFWGTPGVLIPPAEAARLAKSLPNCKAVDIGPGLNLLQEDNPDLIGSEIARWLSTLEISG

SEQ ID NO: 2030 - protein, 277 aa, Synthetic construct
MFHYVDVGPRDGTPVLFLHGNPTSSYVWRNIIPHVAPTHRCIAPDLIGMGKSDKPDLGYFFDDHVRFMDAFIEALGLEEVVLVIHDWGSALGFHWAKRNPERVKGIAFMEFIRPIPTWDEWPEFARETFQAFRTTDVGRKLAIDQNVFIEGTLPMGVVRPLTEVEMDHYREPFLNPVDREPLWRFPNELPIAGEPANIVALVEEYMDWLHQSPVPKLLFWGTPGVLIPPAEAARLAKSLPNCKAVDIGPGLNLLQEDNPDLIGSEIARWLSTLEISG

SEQ ID NO: 2031 - protein, 277 aa, Synthetic construct
MFHYVDVGPRDGTPVLFLHGNPTSSYVWRNIIPHVAPTHRCIAPDLIGMGKSDKPDLGYFFDDHVRFMDAFIEALGLEEVVLVIHDWGSALGFHWAKRNPERVKGIAFMEFIRPIPTWDEWPEFARETFQAFRTTDVGRKLMIDQNVFIEGTLPMGVVRPLTEVEMDHYREPFLNPVDREPLWRFPNELPIAGEPANIVALVEEYMDWLHQSPVPKLLFWGTPGVLIPPAEAARLAKSLPNCKAVDIGPGLNLLQEDNPDLIGSEIARWLSTLEISG

SEQ ID NO: 2032 - protein, 277 aa, Synthetic construct
MFHYVDVGPRDGTPVLFLHGNPTSSYVWRNIIPHVAPTHRCIAPDLIGMGKSDKPDLGYFFDDHVRFMDAFIEALGLEEVVLVIHDWGSALGFHWAKRNPERVKGIAFMEFIRPIPTWDEWPEFARETFQAFRTTDVGRKLTIDQNVFIEGTLPMGVVRPLTEVEMDHYREPFLNPVDREPLWRFPNELPIAGEPANIVALVEEYMDWLHQSPVPKLLFWGTPGVLIPPAEAARLAKSLPNCKAVDIGPGLNLLQEDNPDLIGSEIARWLSTLEISG

SEQ ID NO: 2033 - protein, 277 aa, Synthetic construct
MFHYVDVGPRDGTPVLFLHGNPTSSYVWRNIIPHVAPTHRCIAPDLIGMGKSDKPDLGYFFDDHVRFMDAFIEALGLEEVVLVIHDWGSALGFHWAKRNPERVKGIAFMEFIRPIPTWDEWPEFARETFQAFRTTDVGRKLFIDQNVFIEGTLPMGVVRPLTEVEMDHYREPFLNPVDREPLWRFPNELPIAGEPANIVALVEEYMDWLHQSPVPKLLFWGTPGVLIPPAEAARLAKSLPNCKAVDIGPGLNLLQEDNPDLIGSEIARWLSTLEISG

SEQ ID NO: 2034 - protein, 277 aa, Synthetic construct
MFHYVDVGPRDGTPVLFLHGNPTSSYVWRNIIPHVAPTHRCIAPDLIGMGKSDKPDLGYFFDDHVRFMDAFIEALGLEEVVLVIHDWGSALGFHWAKRNPERVKGIAFMEFIRPIPTWDEWPEFARETFQAFRTTDVGRKLILDQNVFIEGTLPMGVVRPLTEVEMDHYREPFLNPVDREPLWRFPNELPIAGEPANIVALVEEYMDWLHQSPVPKLLFWGTPGVLIPPAEAARLAKSLPNCKAVDIGPGLNLLQEDNPDLIGSEIARWLSTLEISG

SEQ ID NO: 2035 - protein, 277 aa, Synthetic construct
MFHYVDVGPRDGTPVLFLHGNPTSSYVWRNIIPHVAPTHRCIAPDLIGMGKSDKPDLGYFFDDHVRFMDAFIEALGLEEVVLVIHDWGSALGFHWAKRNPERVKGIAFMEFIRPIPTWDEWPEFARETFQAFRTTDVGRKLIMDQNVFIEGTLPMGVVRPLTEVEMDHYREPFLNPVDREPLWRFPNELPIAGEPANIVALVEEYMDWLHQSPVPKLLFWGTPGVLIPPAEAARLAKSLPNCKAVDIGPGLNLLQEDNPDLIGSEIARWLSTLEISG

SEQ ID NO: 2036 - protein, 277 aa, Synthetic construct
MFHYVDVGPRDGTPVLFLHGNPTSSYVWRNIIPHVAPTHRCIAPDLIGMGKSDKPDLGYFFDDHVRFMDAFIEALGLEEVVLVIHDWGSALGFHWAKRNPERVKGIAFMEFIRPIPTWDEWPEFARETFQAFRTTDVGRKLIVDQNVFIEGTLPMGVVRPLTEVEMDHYREPFLNPVDREPLWRFPNELPIAGEPANIVALVEEYMDWLHQSPVPKLLFWGTPGVLIPPAEAARLAKSLPNCKAVDIGPGLNLLQEDNPDLIGSEIARWLSTLEISG

SEQ ID NO: 2037 - protein, 277 aa, Synthetic construct
MFHYVDVGPRDGTPVLFLHGNPTSSYVWRNIIPHVAPTHRCIAPDLIGMGKSDKPDLGYFFDDHVRFMDAFIEALGLEEVVLVIHDWGSALGFHWAKRNPERVKGIAFMEFIRPIPTWDEWPEFARETFQAFRTTDVGRKLIFDQNVFIEGTLPMGVVRPLTEVEMDHYREPFLNPVDREPLWRFPNELPIAGEPANIVALVEEYMDWLHQSPVPKLLFWGTPGVLIPPAEAARLAKSLPNCKAVDIGPGLNLLQEDNPDLIGSEIARWLSTLEISG

SEQ ID NO: 2038 - protein, 277 aa, Synthetic construct
MFHYVDVGPRDGTPVLFLHGNPTSSYVWRNIIPHVAPTHRCIAPDLIGMGKSDKPDLGYFFDDHVRFMDAFIEALGLEEVVLVIHDWGSALGFHWAKRNPERVKGIAFMEFIRPIPTWDEWPEFARETFQAFRTTDVGRKLITDQNVFIEGTLPMGVVRPLTEVEMDHYREPFLNPVDREPLWRFPNELPIAGEPANIVALVEEYMDWLHQSPVPKLLFWGTPGVLIPPAEAARLAKSLPNCKAVDIGPGLNLLQEDNPDLIGSEIARWLSTLEISG

SEQ ID NO: 2039 - protein, 277 aa, Synthetic construct
MFHYVDVGPRDGTPVLFLHGNPTSSYVWRNIIPHVAPTHRCIAPDLIGMGKSDKPDLGYFFDDHVRFMDAFIEALGLEEVVLVIHDWGSALGFHWAKRNPERVKGIAFMEFIRPIPTWDEWPEFARETFQAFRTTDVGRKLIADQNVFIEGTLPMGVVRPLTEVEMDHYREPFLNPVDREPLWRFPNELPIAGEPANIVALVEEYMDWLHQSPVPKLLFWGTPGVLIPPAEAARLAKSLPNCKAVDIGPGLNLLQEDNPDLIGSEIARWLSTLEISG

SEQ ID NO: 2040 - protein, 277 aa, Synthetic construct
MFHYVDVGPRDGTPVLFLHGNPTSSYVWRNIIPHVAPTHRCIAPDLIGMGKSDKPDLGYFFDDHVRFMDAFIEALGLEEVVLVIHDWGSALGFHWAKRNPERVKGIAFMEFIRPIPTWDEWPEFARETFQAFRTTDVGRKLIIEQNVFIEGTLPMGVVRPLTEVEMDHYREPFLNPVDREPLWRFPNELPIAGEPANIVALVEEYMDWLHQSPVPKLLFWGTPGVLIPPAEAARLAKSLPNCKAVDIGPGLNLLQEDNPDLIGSEIARWLSTLEISG

SEQ ID NO: 2041 - protein, 277 aa, Synthetic construct
MFHYVDVGPRDGTPVLFLHGNPTSSYVWRNIIPHVAPTHRCIAPDLIGMGKSDKPDLGYFFDDHVRFMDAFIEALGLEEVVLVIHDWGSALGFHWAKRNPERVKGIAFMEFIRPIPTWDEWPEFARETFQAFRTTDVGRKLIIQQNVFIEGTLPMGVVRPLTEVEMDHYREPFLNPVDREPLWRFPNELPIAGEPANIVALVEEYMDWLHQSPVPKLLFWGTPGVLIPPAEAARLAKSLPNCKAVDIGPGLNLLQEDNPDLIGSEIARWLSTLEISG

SEQ ID NO: 2042 - protein, 277 aa, Synthetic construct
MFHYVDVGPRDGTPVLFLHGNPTSSYVWRNIIPHVAPTHRCIAPDLIGMGKSDKPDLGYFFDDHVRFMDAFIEALGLEEVVLVIHDWGSALGFHWAKRNPERVKGIAFMEFIRPIPTWDEWPEFARETFQAFRTTDVGRKLIINQNVFIEGTLPMGVVRPLTEVEMDHYREPFLNPVDREPLWRFPNELPIAGEPANIVALVEEYMDWLHQSPVPKLLFWGTPGVLIPPAEAARLAKSLPNCKAVDIGPGLNLLQEDNPDLIGSEIARWLSTLEISG

SEQ ID NO: 2043 - protein, 277 aa, Synthetic construct
MFHYVDVGPRDGTPVLFLHGNPTSSYVWRNIIPHVAPTHRCIAPDLIGMGKSDKPDLGYFFDDHVRFMDAFIEALGLEEVVLVIHDWGSALGFHWAKRNPERVKGIAFMEFIRPIPTWDEWPEFARETFQAFRTTDVGRKLIIGQNVFIEGTLPMGVVRPLTEVEMDHYREPFLNPVDREPLWRFPNELPIAGEPANIVALVEEYMDWLHQSPVPKLLFWGTPGVLIPPAEAARLAKSLPNCKAVDIGPGLNLLQEDNPDLIGSEIARWLSTLEISG

SEQ ID NO: 2044 - protein, 277 aa, Synthetic construct
MFHYVDVGPRDGTPVLFLHGNPTSSYVWRNIIPHVAPTHRCIAPDLIGMGKSDKPDLGYFFDDHVRFMDAFIEALGLEEVVLVIHDWGSALGFHWAKRNPERVKGIAFMEFIRPIPTWDEWPEFARETFQAFRTTDVGRKLIIKQNVFIEGTLPMGVVRPLTEVEMDHYREPFLNPVDREPLWRFPNELPIAGEPANIVALVEEYMDWLHQSPVPKLLFWGTPGVLIPPAEAARLAKSLPNCKAVDIGPGLNLLQEDNPDLIGSEIARWLSTLEISG

SEQ ID NO: 2045 - protein, 277 aa, Synthetic construct
MFHYVDVGPRDGTPVLFLHGNPTSSYVWRNIIPHVAPTHRCIAPDLIGMGKSDKPDLGYFFDDHVRFMDAFIEALGLEEVVLVIHDWGSALGFHWAKRNPERVKGIAFMEFIRPIPTWDEWPEFARETFQAFRTTDVGRKLIISQNVFIEGTLPMGVVRPLTEVEMDHYREPFLNPVDREPLWRFPNELPIAGEPANIVALVEEYMDWLHQSPVPKLLFWGTPGVLIPPAEAARLAKSLPNCKAVDIGPGLNLLQEDNPDLIGSEIARWLSTLEISG

SEQ ID NO: 2046 - protein, 277 aa, Synthetic construct
MFHYVDVGPRDGTPVLFLHGNPTSSYVWRNIIPHVAPTHRCIAPDLIGMGKSDKPDLGYFFDDHVRFMDAFIEALGLEEVVLVIHDWGSALGFHWAKRNPERVKGIAFMEFIRPIPTWDEWPEFARETFQAFRTTDVGRKLIIDKNVFIEGTLPMGVVRPLTEVEMDHYREPFLNPVDREPLWRFPNELPIAGEPANIVALVEEYMDWLHQSPVPKLLFWGTPGVLIPPAEAARLAKSLPNCKAVDIGPGLNLLQEDNPDLIGSEIARWLSTLEISG

SEQ ID NO: 2047 - protein, 277 aa, Synthetic construct
MFHYVDVGPRDGTPVLFLHGNPTSSYVWRNIIPHVAPTHRCIAPDLIGMGKSDKPDLGYFFDDHVRFMDAFIEALGLEEVVLVIHDWGSALGFHWAKRNPERVKGIAFMEFIRPIPTWDEWPEFARETFQAFRTTDVGRKLIIDRNVFIEGTLPMGVVRPLTEVEMDHYREPFLNPVDREPLWRFPNELPIAGEPANIVALVEEYMDWLHQSPVPKLLFWGTPGVLIPPAEAARLAKSLPNCKAVDIGPGLNLLQEDNPDLIGSEIARWLSTLEISG

SEQ ID NO: 2048 - protein, 277 aa, Synthetic construct
MFHYVDVGPRDGTPVLFLHGNPTSSYVWRNIIPHVAPTHRCIAPDLIGMGKSDKPDLGYFFDDHVRFMDAFIEALGLEEVVLVIHDWGSALGFHWAKRNPERVKGIAFMEFIRPIPTWDEWPEFARETFQAFRTTDVGRKLIIDENVFIEGTLPMGVVRPLTEVEMDHYREPFLNPVDREPLWRFPNELPIAGEPANIVALVEEYMDWLHQSPVPKLLFWGTPGVLIPPAEAARLAKSLPNCKAVDIGPGLNLLQEDNPDLIGSEIARWLSTLEISG

SEQ ID NO: 2049 - protein, 277 aa, Synthetic construct
MFHYVDVGPRDGTPVLFLHGNPTSSYVWRNIIPHVAPTHRCIAPDLIGMGKSDKPDLGYFFDDHVRFMDAFIEALGLEEVVLVIHDWGSALGFHWAKRNPERVKGIAFMEFIRPIPTWDEWPEFARETFQAFRTTDVGRKLIIDDNVFIEGTLPMGVVRPLTEVEMDHYREPFLNPVDREPLWRFPNELPIAGEPANIVALVEEYMDWLHQSPVPKLLFWGTPGVLIPPAEAARLAKSLPNCKAVDIGPGLNLLQEDNPDLIGSEIARWLSTLEISG

SEQ ID NO: 2050 - protein, 277 aa, Synthetic construct
MFHYVDVGPRDGTPVLFLHGNPTSSYVWRNIIPHVAPTHRCIAPDLIGMGKSDKPDLGYFFDDHVRFMDAFIEALGLEEVVLVIHDWGSALGFHWAKRNPERVKGIAFMEFIRPIPTWDEWPEFARETFQAFRTTDVGRKLIIDNNVFIEGTLPMGVVRPLTEVEMDHYREPFLNPVDREPLWRFPNELPIAGEPANIVALVEEYMDWLHQSPVPKLLFWGTPGVLIPPAEAARLAKSLPNCKAVDIGPGLNLLQEDNPDLIGSEIARWLSTLEISG

SEQ ID NO: 2051 - protein, 277 aa, Synthetic construct
MFHYVDVGPRDGTPVLFLHGNPTSSYVWRNIIPHVAPTHRCIAPDLIGMGKSDKPDLGYFFDDHVRFMDAFIEALGLEEVVLVIHDWGSALGFHWAKRNPERVKGIAFMEFIRPIPTWDEWPEFARETFQAFRTTDVGRKLIIDANVFIEGTLPMGVVRPLTEVEMDHYREPFLNPVDREPLWRFPNELPIAGEPANIVALVEEYMDWLHQSPVPKLLFWGTPGVLIPPAEAARLAKSLPNCKAVDIGPGLNLLQEDNPDLIGSEIARWLSTLEISG

SEQ ID NO: 2052 - protein, 277 aa, Synthetic construct
MFHYVDVGPRDGTPVLFLHGNPTSSYVWRNIIPHVAPTHRCIAPDLIGMGKSDKPDLGYFFDDHVRFMDAFIEALGLEEVVLVIHDWGSALGFHWAKRNPERVKGIAFMEFIRPIPTWDEWPEFARETFQAFRTTDVGRKLIIDQSVFIEGTLPMGVVRPLTEVEMDHYREPFLNPVDREPLWRFPNELPIAGEPANIVALVEEYMDWLHQSPVPKLLFWGTPGVLIPPAEAARLAKSLPNCKAVDIGPGLNLLQEDNPDLIGSEIARWLSTLEISG

SEQ ID NO: 2053 - protein, 277 aa, Synthetic construct
MFHYVDVGPRDGTPVLFLHGNPTSSYVWRNIIPHVAPTHRCIAPDLIGMGKSDKPDLGYFFDDHVRFMDAFIEALGLEEVVLVIHDWGSALGFHWAKRNPERVKGIAFMEFIRPIPTWDEWPEFARETFQAFRTTDVGRKLIIDQHVFIEGTLPMGVVRPLTEVEMDHYREPFLNPVDREPLWRFPNELPIAGEPANIVALVEEYMDWLHQSPVPKLLFWGTPGVLIPPAEAARLAKSLPNCKAVDIGPGLNLLQEDNPDLIGSEIARWLSTLEISG

SEQ ID NO: 2054 - protein, 277 aa, Synthetic construct
MFHYVDVGPRDGTPVLFLHGNPTSSYVWRNIIPHVAPTHRCIAPDLIGMGKSDKPDLGYFFDDHVRFMDAFIEALGLEEVVLVIHDWGSALGFHWAKRNPERVKGIAFMEFIRPIPTWDEWPEFARETFQAFRTTDVGRKLIIDQTVFIEGTLPMGVVRPLTEVEMDHYREPFLNPVDREPLWRFPNELPIAGEPANIVALVEEYMDWLHQSPVPKLLFWGTPGVLIPPAEAARLAKSLPNCKAVDIGPGLNLLQEDNPDLIGSEIARWLSTLEISG

SEQ ID NO: 2055 - protein, 277 aa, Synthetic construct
MFHYVDVGPRDGTPVLFLHGNPTSSYVWRNIIPHVAPTHRCIAPDLIGMGKSDKPDLGYFFDDHVRFMDAFIEALGLEEVVLVIHDWGSALGFHWAKRNPERVKGIAFMEFIRPIPTWDEWPEFARETFQAFRTTDVGRKLIIDQDVFIEGTLPMGVVRPLTEVEMDHYREPFLNPVDREPLWRFPNELPIAGEPANIVALVEEYMDWLHQSPVPKLLFWGTPGVLIPPAEAARLAKSLPNCKAVDIGPGLNLLQEDNPDLIGSEIARWLSTLEISG

SEQ ID NO: 2056 - protein, 277 aa, Synthetic construct
MFHYVDVGPRDGTPVLFLHGNPTSSYVWRNIIPHVAPTHRCIAPDLIGMGKSDKPDLGYFFDDHVRFMDAFIEALGLEEVVLVIHDWGSALGFHWAKRNPERVKGIAFMEFIRPIPTWDEWPEFARETFQAFRTTDVGRKLIIDQGVFIEGTLPMGVVRPLTEVEMDHYREPFLNPVDREPLWRFPNELPIAGEPANIVALVEEYMDWLHQSPVPKLLFWGTPGVLIPPAEAARLAKSLPNCKAVDIGPGLNLLQEDNPDLIGSEIARWLSTLEISG

SEQ ID NO: 2057 - protein, 277 aa, Synthetic construct
MFHYVDVGPRDGTPVLFLHGNPTSSYVWRNIIPHVAPTHRCIAPDLIGMGKSDKPDLGYFFDDHVRFMDAFIEALGLEEVVLVIHDWGSALGFHWAKRNPERVKGIAFMEFIRPIPTWDEWPEFARETFQAFRTTDVGRKLIIDQKVFIEGTLPMGVVRPLTEVEMDHYREPFLNPVDREPLWRFPNELPIAGEPANIVALVEEYMDWLHQSPVPKLLFWGTPGVLIPPAEAARLAKSLPNCKAVDIGPGLNLLQEDNPDLIGSEIARWLSTLEISG

SEQ ID NO: 2058 - protein, 277 aa, Synthetic construct
MFHYVDVGPRDGTPVLFLHGNPTSSYVWRNIIPHVAPTHRCIAPDLIGMGKSDKPDLGYFFDDHVRFMDAFIEALGLEEVVLVIHDWGSALGFHWAKRNPERVKGIAFMEFIRPIPTWDEWPEFARETFQAFRTTDVGRKLIIDQNLFIEGTLPMGVVRPLTEVEMDHYREPFLNPVDREPLWRFPNELPIAGEPANIVALVEEYMDWLHQSPVPKLLFWGTPGVLIPPAEAARLAKSLPNCKAVDIGPGLNLLQEDNPDLIGSEIARWLSTLEISG

SEQ ID NO: 2059 - protein, 277 aa, Synthetic construct
MFHYVDVGPRDGTPVLFLHGNPTSSYVWRNIIPHVAPTHRCIAPDLIGMGKSDKPDLGYFFDDHVRFMDAFIEALGLEEVVLVIHDWGSALGFHWAKRNPERVKGIAFMEFIRPIPTWDEWPEFARETFQAFRTTDVGRKLIIDQNIFIEGTLPMGVVRPLTEVEMDHYREPFLNPVDREPLWRFPNELPIAGEPANIVALVEEYMDWLHQSPVPKLLFWGTPGVLIPPAEAARLAKSLPNCKAVDIGPGLNLLQEDNPDLIGSEIARWLSTLEISG

SEQ ID NO: 2060 - protein, 277 aa, Synthetic construct
MFHYVDVGPRDGTPVLFLHGNPTSSYVWRNIIPHVAPTHRCIAPDLIGMGKSDKPDLGYFFDDHVRFMDAFIEALGLEEVVLVIHDWGSALGFHWAKRNPERVKGIAFMEFIRPIPTWDEWPEFARETFQAFRTTDVGRKLIIDQNFFIEGTLPMGVVRPLTEVEMDHYREPFLNPVDREPLWRFPNELPIAGEPANIVALVEEYMDWLHQSPVPKLLFWGTPGVLIPPAEAARLAKSLPNCKAVDIGPGLNLLQEDNPDLIGSEIARWLSTLEISG

SEQ ID NO: 2061 - protein, 277 aa, Synthetic construct
MFHYVDVGPRDGTPVLFLHGNPTSSYVWRNIIPHVAPTHRCIAPDLIGMGKSDKPDLGYFFDDHVRFMDAFIEALGLEEVVLVIHDWGSALGFHWAKRNPERVKGIAFMEFIRPIPTWDEWPEFARETFQAFRTTDVGRKLIIDQNAFIEGTLPMGVVRPLTEVEMDHYREPFLNPVDREPLWRFPNELPIAGEPANIVALVEEYMDWLHQSPVPKLLFWGTPGVLIPPAEAARLAKSLPNCKAVDIGPGLNLLQEDNPDLIGSEIARWLSTLEISG

SEQ ID NO: 2062 - protein, 277 aa, Synthetic construct
MFHYVDVGPRDGTPVLFLHGNPTSSYVWRNIIPHVAPTHRCIAPDLIGMGKSDKPDLGYFFDDHVRFMDAFIEALGLEEVVLVIHDWGSALGFHWAKRNPERVKGIAFMEFIRPIPTWDEWPEFARETFQAFRTTDVGRKLIIDQNMFIEGTLPMGVVRPLTEVEMDHYREPFLNPVDREPLWRFPNELPIAGEPANIVALVEEYMDWLHQSPVPKLLFWGTPGVLIPPAEAARLAKSLPNCKAVDIGPGLNLLQEDNPDLIGSEIARWLSTLEISG

SEQ ID NO: 2063 - protein, 277 aa, Synthetic construct
MFHYVDVGPRDGTPVLFLHGNPTSSYVWRNIIPHVAPTHRCIAPDLIGMGKSDKPDLGYFFDDHVRFMDAFIEALGLEEVVLVIHDWGSALGFHWAKRNPERVKGIAFMEFIRPIPTWDEWPEFARETFQAFRTTDVGRKLIIDQNTFIEGTLPMGVVRPLTEVEMDHYREPFLNPVDREPLWRFPNELPIAGEPANIVALVEEYMDWLHQSPVPKLLFWGTPGVLIPPAEAARLAKSLPNCKAVDIGPGLNLLQEDNPDLIGSEIARWLSTLEISG

SEQ ID NO: 2064 - protein, 277 aa, Synthetic construct
MFHYVDVGPRDGTPVLFLHGNPTSSYVWRNIIPHVAPTHRCIAPDLIGMGKSDKPDLGYFFDDHVRFMDAFIEALGLEEVVLVIHDWGSALGFHWAKRNPERVKGIAFMEFIRPIPTWDEWPEFARETFQAFRTTDVGRKLIIDQNVLIEGTLPMGVVRPLTEVEMDHYREPFLNPVDREPLWRFPNELPIAGEPANIVALVEEYMDWLHQSPVPKLLFWGTPGVLIPPAEAARLAKSLPNCKAVDIGPGLNLLQEDNPDLIGSEIARWLSTLEISG

SEQ ID NO: 2065 - protein, 277 aa, Synthetic construct
MFHYVDVGPRDGTPVLFLHGNPTSSYVWRNIIPHVAPTHRCIAPDLIGMGKSDKPDLGYFFDDHVRFMDAFIEALGLEEVVLVIHDWGSALGFHWAKRNPERVKGIAFMEFIRPIPTWDEWPEFARETFQAFRTTDVGRKLIIDQNVYIEGTLPMGVVRPLTEVEMDHYREPFLNPVDREPLWRFPNELPIAGEPANIVALVEEYMDWLHQSPVPKLLFWGTPGVLIPPAEAARLAKSLPNCKAVDIGPGLNLLQEDNPDLIGSEIARWLSTLEISG

SEQ ID NO: 2066 - protein, 277 aa, Synthetic construct
MFHYVDVGPRDGTPVLFLHGNPTSSYVWRNIIPHVAPTHRCIAPDLIGMGKSDKPDLGYFFDDHVRFMDAFIEALGLEEVVLVIHDWGSALGFHWAKRNPERVKGIAFMEFIRPIPTWDEWPEFARETFQAFRTTDVGRKLIIDQNVMIEGTLPMGVVRPLTEVEMDHYREPFLNPVDREPLWRFPNELPIAGEPANIVALVEEYMDWLHQSPVPKLLFWGTPGVLIPPAEAARLAKSLPNCKAVDIGPGLNLLQEDNPDLIGSEIARWLSTLEISG

SEQ ID NO: 2067 - protein, 277 aa, Synthetic construct
MFHYVDVGPRDGTPVLFLHGNPTSSYVWRNIIPHVAPTHRCIAPDLIGMGKSDKPDLGYFFDDHVRFMDAFIEALGLEEVVLVIHDWGSALGFHWAKRNPERVKGIAFMEFIRPIPTWDEWPEFARETFQAFRTTDVGRKLIIDQNVIIEGTLPMGVVRPLTEVEMDHYREPFLNPVDREPLWRFPNELPIAGEPANIVALVEEYMDWLHQSPVPKLLFWGTPGVLIPPAEAARLAKSLPNCKAVDIGPGLNLLQEDNPDLIGSEIARWLSTLEISG

SEQ ID NO: 2068 - protein, 277 aa, Synthetic construct
MFHYVDVGPRDGTPVLFLHGNPTSSYVWRNIIPHVAPTHRCIAPDLIGMGKSDKPDLGYFFDDHVRFMDAFIEALGLEEVVLVIHDWGSALGFHWAKRNPERVKGIAFMEFIRPIPTWDEWPEFARETFQAFRTTDVGRKLIIDQNVVIEGTLPMGVVRPLTEVEMDHYREPFLNPVDREPLWRFPNELPIAGEPANIVALVEEYMDWLHQSPVPKLLFWGTPGVLIPPAEAARLAKSLPNCKAVDIGPGLNLLQEDNPDLIGSEIARWLSTLEISG

SEQ ID NO: 2069 - protein, 277 aa, Synthetic construct
MFHYVDVGPRDGTPVLFLHGNPTSSYVWRNIIPHVAPTHRCIAPDLIGMGKSDKPDLGYFFDDHVRFMDAFIEALGLEEVVLVIHDWGSALGFHWAKRNPERVKGIAFMEFIRPIPTWDEWPEFARETFQAFRTTDVGRKLIIDQNVWIEGTLPMGVVRPLTEVEMDHYREPFLNPVDREPLWRFPNELPIAGEPANIVALVEEYMDWLHQSPVPKLLFWGTPGVLIPPAEAARLAKSLPNCKAVDIGPGLNLLQEDNPDLIGSEIARWLSTLEISG

SEQ ID NO: 2070 - protein, 277 aa, Synthetic construct
MFHYVDVGPRDGTPVLFLHGNPTSSYVWRNIIPHVAPTHRCIAPDLIGMGKSDKPDLGYFFDDHVRFMDAFIEALGLEEVVLVIHDWGSALGFHWAKRNPERVKGIAFMEFIRPIPTWDEWPEFARETFQAFRTTDVGRKLIIDQNVFVEGTLPMGVVRPLTEVEMDHYREPFLNPVDREPLWRFPNELPIAGEPANIVALVEEYMDWLHQSPVPKLLFWGTPGVLIPPAEAARLAKSLPNCKAVDIGPGLNLLQEDNPDLIGSEIARWLSTLEISG

SEQ ID NO: 2071 - protein, 277 aa, Synthetic construct
MFHYVDVGPRDGTPVLFLHGNPTSSYVWRNIIPHVAPTHRCIAPDLIGMGKSDKPDLGYFFDDHVRFMDAFIEALGLEEVVLVIHDWGSALGFHWAKRNPERVKGIAFMEFIRPIPTWDEWPEFARETFQAFRTTDVGRKLIIDQNVFLEGTLPMGVVRPLTEVEMDHYREPFLNPVDREPLWRFPNELPIAGEPANIVALVEEYMDWLHQSPVPKLLFWGTPGVLIPPAEAARLAKSLPNCKAVDIGPGLNLLQEDNPDLIGSEIARWLSTLEISG

SEQ ID NO: 2072 - protein, 277 aa, Synthetic construct
MFHYVDVGPRDGTPVLFLHGNPTSSYVWRNIIPHVAPTHRCIAPDLIGMGKSDKPDLGYFFDDHVRFMDAFIEALGLEEVVLVIHDWGSALGFHWAKRNPERVKGIAFMEFIRPIPTWDEWPEFARETFQAFRTTDVGRKLIIDQNVFMEGTLPMGVVRPLTEVEMDHYREPFLNPVDREPLWRFPNELPIAGEPANIVALVEEYMDWLHQSPVPKLLFWGTPGVLIPPAEAARLAKSLPNCKAVDIGPGLNLLQEDNPDLIGSEIARWLSTLEISG

SEQ ID NO: 2073 - protein, 277 aa, Synthetic construct
MFHYVDVGPRDGTPVLFLHGNPTSSYVWRNIIPHVAPTHRCIAPDLIGMGKSDKPDLGYFFDDHVRFMDAFIEALGLEEVVLVIHDWGSALGFHWAKRNPERVKGIAFMEFIRPIPTWDEWPEFARETFQAFRTTDVGRKLIIDQNVFAEGTLPMGVVRPLTEVEMDHYREPFLNPVDREPLWRFPNELPIAGEPANIVALVEEYMDWLHQSPVPKLLFWGTPGVLIPPAEAARLAKSLPNCKAVDIGPGLNLLQEDNPDLIGSEIARWLSTLEISG

SEQ ID NO: 2074 - protein, 277 aa, Synthetic construct
MFHYVDVGPRDGTPVLFLHGNPTSSYVWRNIIPHVAPTHRCIAPDLIGMGKSDKPDLGYFFDDHVRFMDAFIEALGLEEVVLVIHDWGSALGFHWAKRNPERVKGIAFMEFIRPIPTWDEWPEFARETFQAFRTTDVGRKLIIDQNVFTEGTLPMGVVRPLTEVEMDHYREPFLNPVDREPLWRFPNELPIAGEPANIVALVEEYMDWLHQSPVPKLLFWGTPGVLIPPAEAARLAKSLPNCKAVDIGPGLNLLQEDNPDLIGSEIARWLSTLEISG

SEQ ID NO: 2075 - protein, 277 aa, Synthetic construct
MFHYVDVGPRDGTPVLFLHGNPTSSYVWRNIIPHVAPTHRCIAPDLIGMGKSDKPDLGYFFDDHVRFMDAFIEALGLEEVVLVIHDWGSALGFHWAKRNPERVKGIAFMEFIRPIPTWDEWPEFARETFQAFRTTDVGRKLIIDQNVFFEGTLPMGVVRPLTEVEMDHYREPFLNPVDREPLWRFPNELPIAGEPANIVALVEEYMDWLHQSPVPKLLFWGTPGVLIPPAEAARLAKSLPNCKAVDIGPGLNLLQEDNPDLIGSEIARWLSTLEISG

SEQ ID NO: 2076 - protein, 277 aa, Synthetic construct
MFHYVDVGPRDGTPVLFLHGNPTSSYVWRNIIPHVAPTHRCIAPDLIGMGKSDKPDLGYFFDDHVRFMDAFIEALGLEEVVLVIHDWGSALGFHWAKRNPERVKGIAFMEFIRPIPTWDEWPEFARETFQAFRTTDVGRKLIIDQNVFIDGTLPMGVVRPLTEVEMDHYREPFLNPVDREPLWRFPNELPIAGEPANIVALVEEYMDWLHQSPVPKLLFWGTPGVLIPPAEAARLAKSLPNCKAVDIGPGLNLLQEDNPDLIGSEIARWLSTLEISG

SEQ ID NO: 2077 - protein, 277 aa, Synthetic construct
MFHYVDVGPRDGTPVLFLHGNPTSSYVWRNIIPHVAPTHRCIAPDLIGMGKSDKPDLGYFFDDHVRFMDAFIEALGLEEVVLVIHDWGSALGFHWAKRNPERVKGIAFMEFIRPIPTWDEWPEFARETFQAFRTTDVGRKLIIDQNVFIQGTLPMGVVRPLTEVEMDHYREPFLNPVDREPLWRFPNELPIAGEPANIVALVEEYMDWLHQSPVPKLLFWGTPGVLIPPAEAARLAKSLPNCKAVDIGPGLNLLQEDNPDLIGSEIARWLSTLEISG

SEQ ID NO: 2078 - protein, 277 aa, Synthetic construct
MFHYVDVGPRDGTPVLFLHGNPTSSYVWRNIIPHVAPTHRCIAPDLIGMGKSDKPDLGYFFDDHVRFMDAFIEALGLEEVVLVIHDWGSALGFHWAKRNPERVKGIAFMEFIRPIPTWDEWPEFARETFQAFRTTDVGRKLIIDQNVFIAGTLPMGVVRPLTEVEMDHYREPFLNPVDREPLWRFPNELPIAGEPANIVALVEEYMDWLHQSPVPKLLFWGTPGVLIPPAEAARLAKSLPNCKAVDIGPGLNLLQEDNPDLIGSEIARWLSTLEISG

SEQ ID NO: 2079 - protein, 277 aa, Synthetic construct
MFHYVDVGPRDGTPVLFLHGNPTSSYVWRNIIPHVAPTHRCIAPDLIGMGKSDKPDLGYFFDDHVRFMDAFIEALGLEEVVLVIHDWGSALGFHWAKRNPERVKGIAFMEFIRPIPTWDEWPEFARETFQAFRTTDVGRKLIIDQNVFIGGTLPMGVVRPLTEVEMDHYREPFLNPVDREPLWRFPNELPIAGEPANIVALVEEYMDWLHQSPVPKLLFWGTPGVLIPPAEAARLAKSLPNCKAVDIGPGLNLLQEDNPDLIGSEIARWLSTLEISG

SEQ ID NO: 2080 - protein, 277 aa, Synthetic construct
MFHYVDVGPRDGTPVLFLHGNPTSSYVWRNIIPHVAPTHRCIAPDLIGMGKSDKPDLGYFFDDHVRFMDAFIEALGLEEVVLVIHDWGSALGFHWAKRNPERVKGIAFMEFIRPIPTWDEWPEFARETFQAFRTTDVGRKLIIDQNVFISGTLPMGVVRPLTEVEMDHYREPFLNPVDREPLWRFPNELPIAGEPANIVALVEEYMDWLHQSPVPKLLFWGTPGVLIPPAEAARLAKSLPNCKAVDIGPGLNLLQEDNPDLIGSEIARWLSTLEISG

SEQ ID NO: 2081 - protein, 277 aa, Synthetic construct
MFHYVDVGPRDGTPVLFLHGNPTSSYVWRNIIPHVAPTHRCIAPDLIGMGKSDKPDLGYFFDDHVRFMDAFIEALGLEEVVLVIHDWGSALGFHWAKRNPERVKGIAFMEFIRPIPTWDEWPEFARETFQAFRTTDVGRKLIIDQNVFIKGTLPMGVVRPLTEVEMDHYREPFLNPVDREPLWRFPNELPIAGEPANIVALVEEYMDWLHQSPVPKLLFWGTPGVLIPPAEAARLAKSLPNCKAVDIGPGLNLLQEDNPDLIGSEIARWLSTLEISG

SEQ ID NO: 2082 - protein, 277 aa, Synthetic construct
MFHYVDVGPRDGTPVLFLHGNPTSSYVWRNIIPHVAPTHRCIAPDLIGMGKSDKPDLGYFFDDHVRFMDAFIEALGLEEVVLVIHDWGSALGFHWAKRNPERVKGIAFMEFIRPIPTWDEWPEFARETFQAFRTTDVGRKLIIDQNVFIERTLPMGVVRPLTEVEMDHYREPFLNPVDREPLWRFPNELPIAGEPANIVALVEEYMDWLHQSPVPKLLFWGTPGVLIPPAEAARLAKSLPNCKAVDIGPGLNLLQEDNPDLIGSEIARWLSTLEISG

SEQ ID NO: 2083 - protein, 277 aa, Synthetic construct
MFHYVDVGPRDGTPVLFLHGNPTSSYVWRNIIPHVAPTHRCIAPDLIGMGKSDKPDLGYFFDDHVRFMDAFIEALGLEEVVLVIHDWGSALGFHWAKRNPERVKGIAFMEFIRPIPTWDEWPEFARETFQAFRTTDVGRKLIIDQNVFIEKTLPMGVVRPLTEVEMDHYREPFLNPVDREPLWRFPNELPIAGEPANIVALVEEYMDWLHQSPVPKLLFWGTPGVLIPPAEAARLAKSLPNCKAVDIGPGLNLLQEDNPDLIGSEIARWLSTLEISG

SEQ ID NO: 2084 - protein, 277 aa, Synthetic construct
MFHYVDVGPRDGTPVLFLHGNPTSSYVWRNIIPHVAPTHRCIAPDLIGMGKSDKPDLGYFFDDHVRFMDAFIEALGLEEVVLVIHDWGSALGFHWAKRNPERVKGIAFMEFIRPIPTWDEWPEFARETFQAFRTTDVGRKLIIDQNVFIEQTLPMGVVRPLTEVEMDHYREPFLNPVDREPLWRFPNELPIAGEPANIVALVEEYMDWLHQSPVPKLLFWGTPGVLIPPAEAARLAKSLPNCKAVDIGPGLNLLQEDNPDLIGSEIARWLSTLEISG

SEQ ID NO: 2085 - protein, 277 aa, Synthetic construct
MFHYVDVGPRDGTPVLFLHGNPTSSYVWRNIIPHVAPTHRCIAPDLIGMGKSDKPDLGYFFDDHVRFMDAFIEALGLEEVVLVIHDWGSALGFHWAKRNPERVKGIAFMEFIRPIPTWDEWPEFARETFQAFRTTDVGRKLIIDQNVFIEATLPMGVVRPLTEVEMDHYREPFLNPVDREPLWRFPNELPIAGEPANIVALVEEYMDWLHQSPVPKLLFWGTPGVLIPPAEAARLAKSLPNCKAVDIGPGLNLLQEDNPDLIGSEIARWLSTLEISG

SEQ ID NO: 2086 - protein, 277 aa, Synthetic construct
MFHYVDVGPRDGTPVLFLHGNPTSSYVWRNIIPHVAPTHRCIAPDLIGMGKSDKPDLGYFFDDHVRFMDAFIEALGLEEVVLVIHDWGSALGFHWAKRNPERVKGIAFMEFIRPIPTWDEWPEFARETFQAFRTTDVGRKLIIDQNVFIETTLPMGVVRPLTEVEMDHYREPFLNPVDREPLWRFPNELPIAGEPANIVALVEEYMDWLHQSPVPKLLFWGTPGVLIPPAEAARLAKSLPNCKAVDIGPGLNLLQEDNPDLIGSEIARWLSTLEISG

SEQ ID NO: 2087 - protein, 277 aa, Synthetic construct
MFHYVDVGPRDGTPVLFLHGNPTSSYVWRNIIPHVAPTHRCIAPDLIGMGKSDKPDLGYFFDDHVRFMDAFIEALGLEEVVLVIHDWGSALGFHWAKRNPERVKGIAFMEFIRPIPTWDEWPEFARETFQAFRTTDVGRKLIIDQNVFIESTLPMGVVRPLTEVEMDHYREPFLNPVDREPLWRFPNELPIAGEPANIVALVEEYMDWLHQSPVPKLLFWGTPGVLIPPAEAARLAKSLPNCKAVDIGPGLNLLQEDNPDLIGSEIARWLSTLEISG

SEQ ID NO: 2088 - protein, 277 aa, Synthetic construct
MFHYVDVGPRDGTPVLFLHGNPTSSYVWRNIIPHVAPTHRCIAPDLIGMGKSDKPDLGYFFDDHVRFMDAFIEALGLEEVVLVIHDWGSALGFHWAKRNPERVKGIAFMEFIRPIPTWDEWPEFARETFQAFRTTDVGRKLIIDQNVFIEGVLPMGVVRPLTEVEMDHYREPFLNPVDREPLWRFPNELPIAGEPANIVALVEEYMDWLHQSPVPKLLFWGTPGVLIPPAEAARLAKSLPNCKAVDIGPGLNLLQEDNPDLIGSEIARWLSTLEISG

SEQ ID NO: 2089 - protein, 277 aa, Synthetic construct
MFHYVDVGPRDGTPVLFLHGNPTSSYVWRNIIPHVAPTHRCIAPDLIGMGKSDKPDLGYFFDDHVRFMDAFIEALGLEEVVLVIHDWGSALGFHWAKRNPERVKGIAFMEFIRPIPTWDEWPEFARETFQAFRTTDVGRKLIIDQNVFIEGILPMGVVRPLTEVEMDHYREPFLNPVDREPLWRFPNELPIAGEPANIVALVEEYMDWLHQSPVPKLLFWGTPGVLIPPAEAARLAKSLPNCKAVDIGPGLNLLQEDNPDLIGSEIARWLSTLEISG

SEQ ID NO: 2090 - protein, 277 aa, Synthetic construct
MFHYVDVGPRDGTPVLFLHGNPTSSYVWRNIIPHVAPTHRCIAPDLIGMGKSDKPDLGYFFDDHVRFMDAFIEALGLEEVVLVIHDWGSALGFHWAKRNPERVKGIAFMEFIRPIPTWDEWPEFARETFQAFRTTDVGRKLIIDQNVFIEGALPMGVVRPLTEVEMDHYREPFLNPVDREPLWRFPNELPIAGEPANIVALVEEYMDWLHQSPVPKLLFWGTPGVLIPPAEAARLAKSLPNCKAVDIGPGLNLLQEDNPDLIGSEIARWLSTLEISG

SEQ ID NO: 2091 - protein, 277 aa, Synthetic construct
MFHYVDVGPRDGTPVLFLHGNPTSSYVWRNIIPHVAPTHRCIAPDLIGMGKSDKPDLGYFFDDHVRFMDAFIEALGLEEVVLVIHDWGSALGFHWAKRNPERVKGIAFMEFIRPIPTWDEWPEFARETFQAFRTTDVGRKLIIDQNVFIEGLLPMGVVRPLTEVEMDHYREPFLNPVDREPLWRFPNELPIAGEPANIVALVEEYMDWLHQSPVPKLLFWGTPGVLIPPAEAARLAKSLPNCKAVDIGPGLNLLQEDNPDLIGSEIARWLSTLEISG

SEQ ID NO: 2092 - protein, 277 aa, Synthetic construct
MFHYVDVGPRDGTPVLFLHGNPTSSYVWRNIIPHVAPTHRCIAPDLIGMGKSDKPDLGYFFDDHVRFMDAFIEALGLEEVVLVIHDWGSALGFHWAKRNPERVKGIAFMEFIRPIPTWDEWPEFARETFQAFRTTDVGRKLIIDQNVFIEGMLPMGVVRPLTEVEMDHYREPFLNPVDREPLWRFPNELPIAGEPANIVALVEEYMDWLHQSPVPKLLFWGTPGVLIPPAEAARLAKSLPNCKAVDIGPGLNLLQEDNPDLIGSEIARWLSTLEISG

SEQ ID NO: 2093 - protein, 277 aa, Synthetic construct
MFHYVDVGPRDGTPVLFLHGNPTSSYVWRNIIPHVAPTHRCIAPDLIGMGKSDKPDLGYFFDDHVRFMDAFIEALGLEEVVLVIHDWGSALGFHWAKRNPERVKGIAFMEFIRPIPTWDEWPEFARETFQAFRTTDVGRKLIIDQNVFIEGFLPMGVVRPLTEVEMDHYREPFLNPVDREPLWRFPNELPIAGEPANIVALVEEYMDWLHQSPVPKLLFWGTPGVLIPPAEAARLAKSLPNCKAVDIGPGLNLLQEDNPDLIGSEIARWLSTLEISG

SEQ ID NO: 2094 - protein, 277 aa, Synthetic construct
MFHYVDVGPRDGTPVLFLHGNPTSSYVWRNIIPHVAPTHRCIAPDLIGMGKSDKPDLGYFFDDHVRFMDAFIEALGLEEVVLVIHDWGSALGFHWAKRNPERVKGIAFMEFIRPIPTWDEWPEFARETFQAFRTTDVGRKLIIDQNVFIEGTIPMGVVRPLTEVEMDHYREPFLNPVDREPLWRFPNELPIAGEPANIVALVEEYMDWLHQSPVPKLLFWGTPGVLIPPAEAARLAKSLPNCKAVDIGPGLNLLQEDNPDLIGSEIARWLSTLEISG

SEQ ID NO: 2095 - protein, 277 aa, Synthetic construct
MFHYVDVGPRDGTPVLFLHGNPTSSYVWRNIIPHVAPTHRCIAPDLIGMGKSDKPDLGYFFDDHVRFMDAFIEALGLEEVVLVIHDWGSALGFHWAKRNPERVKGIAFMEFIRPIPTWDEWPEFARETFQAFRTTDVGRKLIIDQNVFIEGTMPMGVVRPLTEVEMDHYREPFLNPVDREPLWRFPNELPIAGEPANIVALVEEYMDWLHQSPVPKLLFWGTPGVLIPPAEAARLAKSLPNCKAVDIGPGLNLLQEDNPDLIGSEIARWLSTLEISG

SEQ ID NO: 2096 - protein, 277 aa, Synthetic construct
MFHYVDVGPRDGTPVLFLHGNPTSSYVWRNIIPHVAPTHRCIAPDLIGMGKSDKPDLGYFFDDHVRFMDAFIEALGLEEVVLVIHDWGSALGFHWAKRNPERVKGIAFMEFIRPIPTWDEWPEFARETFQAFRTTDVGRKLIIDQNVFIEGTFPMGVVRPLTEVEMDHYREPFLNPVDREPLWRFPNELPIAGEPANIVALVEEYMDWLHQSPVPKLLFWGTPGVLIPPAEAARLAKSLPNCKAVDIGPGLNLLQEDNPDLIGSEIARWLSTLEISG

SEQ ID NO: 2097 - protein, 277 aa, Synthetic construct
MFHYVDVGPRDGTPVLFLHGNPTSSYVWRNIIPHVAPTHRCIAPDLIGMGKSDKPDLGYFFDDHVRFMDAFIEALGLEEVVLVIHDWGSALGFHWAKRNPERVKGIAFMEFIRPIPTWDEWPEFARETFQAFRTTDVGRKLIIDQNVFIEGTVPMGVVRPLTEVEMDHYREPFLNPVDREPLWRFPNELPIAGEPANIVALVEEYMDWLHQSPVPKLLFWGTPGVLIPPAEAARLAKSLPNCKAVDIGPGLNLLQEDNPDLIGSEIARWLSTLEISG

SEQ ID NO: 2098 - protein, 277 aa, Synthetic construct
MFHYVDVGPRDGTPVLFLHGNPTSSYVWRNIIPHVAPTHRCIAPDLIGMGKSDKPDLGYFFDDHVRFMDAFIEALGLEEVVLVIHDWGSALGFHWAKRNPERVKGIAFMEFIRPIPTWDEWPEFARETFQAFRTTDVGRKLIIDQNVFIEGTAPMGVVRPLTEVEMDHYREPFLNPVDREPLWRFPNELPIAGEPANIVALVEEYMDWLHQSPVPKLLFWGTPGVLIPPAEAARLAKSLPNCKAVDIGPGLNLLQEDNPDLIGSEIARWLSTLEISG

SEQ ID NO: 2099 - protein, 277 aa, Synthetic construct
MFHYVDVGPRDGTPVLFLHGNPTSSYVWRNIIPHVAPTHRCIAPDLIGMGKSDKPDLGYFFDDHVRFMDAFIEALGLEEVVLVIHDWGSALGFHWAKRNPERVKGIAFMEFIRPIPTWDEWPEFARETFQAFRTTDVGRKLIIDQNVFIEGTYPMGVVRPLTEVEMDHYREPFLNPVDREPLWRFPNELPIAGEPANIVALVEEYMDWLHQSPVPKLLFWGTPGVLIPPAEAARLAKSLPNCKAVDIGPGLNLLQEDNPDLIGSEIARWLSTLEISG

SEQ ID NO: 2100 - protein, 277 aa, Synthetic construct
MFHYVDVGPRDGTPVLFLHGNPTSSYVWRNIIPHVAPTHRCIAPDLIGMGKSDKPDLGYFFDDHVRFMDAFIEALGLEEVVLVIHDWGSALGFHWAKRNPERVKGIAFMEFIRPIPTWDEWPEFARETFQAFRTTDVGRKLIIDQNVFIEGTLRMGVVRPLTEVEMDHYREPFLNPVDREPLWRFPNELPIAGEPANIVALVEEYMDWLHQSPVPKLLFWGTPGVLIPPAEAARLAKSLPNCKAVDIGPGLNLLQEDNPDLIGSEIARWLSTLEISG

SEQ ID NO: 2101 - protein, 277 aa, Synthetic construct
MFHYVDVGPRDGTPVLFLHGNPTSSYVWRNIIPHVAPTHRCIAPDLIGMGKSDKPDLGYFFDDHVRFMDAFIEALGLEEVVLVIHDWGSALGFHWAKRNPERVKGIAFMEFIRPIPTWDEWPEFARETFQAFRTTDVGRKLIIDQNVFIEGTLAMGVVRPLTEVEMDHYREPFLNPVDREPLWRFPNELPIAGEPANIVALVEEYMDWLHQSPVPKLLFWGTPGVLIPPAEAARLAKSLPNCKAVDIGPGLNLLQEDNPDLIGSEIARWLSTLEISG

SEQ ID NO: 2102 - protein, 277 aa, Synthetic construct
MFHYVDVGPRDGTPVLFLHGNPTSSYVWRNIIPHVAPTHRCIAPDLIGMGKSDKPDLGYFFDDHVRFMDAFIEALGLEEVVLVIHDWGSALGFHWAKRNPERVKGIAFMEFIRPIPTWDEWPEFARETFQAFRTTDVGRKLIIDQNVFIEGTLKMGVVRPLTEVEMDHYREPFLNPVDREPLWRFPNELPIAGEPANIVALVEEYMDWLHQSPVPKLLFWGTPGVLIPPAEAARLAKSLPNCKAVDIGPGLNLLQEDNPDLIGSEIARWLSTLEISG

SEQ ID NO: 2103 - protein, 277 aa, Synthetic construct
MFHYVDVGPRDGTPVLFLHGNPTSSYVWRNIIPHVAPTHRCIAPDLIGMGKSDKPDLGYFFDDHVRFMDAFIEALGLEEVVLVIHDWGSALGFHWAKRNPERVKGIAFMEFIRPIPTWDEWPEFARETFQAFRTTDVGRKLIIDQNVFIEGTLSMGVVRPLTEVEMDHYREPFLNPVDREPLWRFPNELPIAGEPANIVALVEEYMDWLHQSPVPKLLFWGTPGVLIPPAEAARLAKSLPNCKAVDIGPGLNLLQEDNPDLIGSEIARWLSTLEISG

SEQ ID NO: 2104 - protein, 277 aa, Synthetic construct
MFHYVDVGPRDGTPVLFLHGNPTSSYVWRNIIPHVAPTHRCIAPDLIGMGKSDKPDLGYFFDDHVRFMDAFIEALGLEEVVLVIHDWGSALGFHWAKRNPERVKGIAFMEFIRPIPTWDEWPEFARETFQAFRTTDVGRKLIIDQNVFIEGTLTMGVVRPLTEVEMDHYREPFLNPVDREPLWRFPNELPIAGEPANIVALVEEYMDWLHQSPVPKLLFWGTPGVLIPPAEAARLAKSLPNCKAVDIGPGLNLLQEDNPDLIGSEIARWLSTLEISG

SEQ ID NO: 2105 - protein, 277 aa, Synthetic construct
MFHYVDVGPRDGTPVLFLHGNPTSSYVWRNIIPHVAPTHRCIAPDLIGMGKSDKPDLGYFFDDHVRFMDAFIEALGLEEVVLVIHDWGSALGFHWAKRNPERVKGIAFMEFIRPIPTWDEWPEFARETFQAFRTTDVGRKLIIDQNVFIEGTLQMGVVRPLTEVEMDHYREPFLNPVDREPLWRFPNELPIAGEPANIVALVEEYMDWLHQSPVPKLLFWGTPGVLIPPAEAARLAKSLPNCKAVDIGPGLNLLQEDNPDLIGSEIARWLSTLEISG

SEQ ID NO: 2106 - protein, 277 aa, Synthetic construct
MFHYVDVGPRDGTPVLFLHGNPTSSYVWRNIIPHVAPTHRCIAPDLIGMGKSDKPDLGYFFDDHVRFMDAFIEALGLEEVVLVIHDWGSALGFHWAKRNPERVKGIAFMEFIRPIPTWDEWPEFARETFQAFRTTDVGRKLIIDQNVFIEGTLPGGVVRPLTEVEMDHYREPFLNPVDREPLWRFPNELPIAGEPANIVALVEEYMDWLHQSPVPKLLFWGTPGVLIPPAEAARLAKSLPNCKAVDIGPGLNLLQEDNPDLIGSEIARWLSTLEISG

SEQ ID NO: 2107 - protein, 277 aa, Synthetic construct
MFHYVDVGPRDGTPVLFLHGNPTSSYVWRNIIPHVAPTHRCIAPDLIGMGKSDKPDLGYFFDDHVRFMDAFIEALGLEEVVLVIHDWGSALGFHWAKRNPERVKGIAFMEFIRPIPTWDEWPEFARETFQAFRTTDVGRKLIIDQNVFIEGTLPAGVVRPLTEVEMDHYREPFLNPVDREPLWRFPNELPIAGEPANIVALVEEYMDWLHQSPVPKLLFWGTPGVLIPPAEAARLAKSLPNCKAVDIGPGLNLLQEDNPDLIGSEIARWLSTLEISG

SEQ ID NO: 2108 - protein, 277 aa, Synthetic construct
MFHYVDVGPRDGTPVLFLHGNPTSSYVWRNIIPHVAPTHRCIAPDLIGMGKSDKPDLGYFFDDHVRFMDAFIEALGLEEVVLVIHDWGSALGFHWAKRNPERVKGIAFMEFIRPIPTWDEWPEFARETFQAFRTTDVGRKLIIDQNVFIEGTLPSGVVRPLTEVEMDHYREPFLNPVDREPLWRFPNELPIAGEPANIVALVEEYMDWLHQSPVPKLLFWGTPGVLIPPAEAARLAKSLPNCKAVDIGPGLNLLQEDNPDLIGSEIARWLSTLEISG

SEQ ID NO: 2109 - protein, 277 aa, Synthetic construct
MFHYVDVGPRDGTPVLFLHGNPTSSYVWRNIIPHVAPTHRCIAPDLIGMGKSDKPDLGYFFDDHVRFMDAFIEALGLEEVVLVIHDWGSALGFHWAKRNPERVKGIAFMEFIRPIPTWDEWPEFARETFQAFRTTDVGRKLIIDQNVFIEGTLPRGVVRPLTEVEMDHYREPFLNPVDREPLWRFPNELPIAGEPANIVALVEEYMDWLHQSPVPKLLFWGTPGVLIPPAEAARLAKSLPNCKAVDIGPGLNLLQEDNPDLIGSEIARWLSTLEISG

SEQ ID NO: 2110 - protein, 277 aa, Synthetic construct
MFHYVDVGPRDGTPVLFLHGNPTSSYVWRNIIPHVAPTHRCIAPDLIGMGKSDKPDLGYFFDDHVRFMDAFIEALGLEEVVLVIHDWGSALGFHWAKRNPERVKGIAFMEFIRPIPTWDEWPEFARETFQAFRTTDVGRKLIIDQNVFIEGTLPLGVVRPLTEVEMDHYREPFLNPVDREPLWRFPNELPIAGEPANIVALVEEYMDWLHQSPVPKLLFWGTPGVLIPPAEAARLAKSLPNCKAVDIGPGLNLLQEDNPDLIGSEIARWLSTLEISG

SEQ ID NO: 2111 - protein, 277 aa, Synthetic construct
MFHYVDVGPRDGTPVLFLHGNPTSSYVWRNIIPHVAPTHRCIAPDLIGMGKSDKPDLGYFFDDHVRFMDAFIEALGLEEVVLVIHDWGSALGFHWAKRNPERVKGIAFMEFIRPIPTWDEWPEFARETFQAFRTTDVGRKLIIDQNVFIEGTLPKGVVRPLTEVEMDHYREPFLNPVDREPLWRFPNELPIAGEPANIVALVEEYMDWLHQSPVPKLLFWGTPGVLIPPAEAARLAKSLPNCKAVDIGPGLNLLQEDNPDLIGSEIARWLSTLEISG

SEQ ID NO: 2112 - protein, 277 aa, Synthetic construct
MFHYVDVGPRDGTPVLFLHGNPTSSYVWRNIIPHVAPTHRCIAPDLIGMGKSDKPDLGYFFDDHVRFMDAFIEALGLEEVVLVIHDWGSALGFHWAKRNPERVKGIAFMEFIRPIPTWDEWPEFARETFQAFRTTDVGRKLIIDQNVFIEGTLPMAVVRPLTEVEMDHYREPFLNPVDREPLWRFPNELPIAGEPANIVALVEEYMDWLHQSPVPKLLFWGTPGVLIPPAEAARLAKSLPNCKAVDIGPGLNLLQEDNPDLIGSEIARWLSTLEISG

SEQ ID NO: 2113 - protein, 277 aa, Synthetic construct
MFHYVDVGPRDGTPVLFLHGNPTSSYVWRNIIPHVAPTHRCIAPDLIGMGKSDKPDLGYFFDDHVRFMDAFIEALGLEEVVLVIHDWGSALGFHWAKRNPERVKGIAFMEFIRPIPTWDEWPEFARETFQAFRTTDVGRKLIIDQNVFIEGTLPMTVVRPLTEVEMDHYREPFLNPVDREPLWRFPNELPIAGEPANIVALVEEYMDWLHQSPVPKLLFWGTPGVLIPPAEAARLAKSLPNCKAVDIGPGLNLLQEDNPDLIGSEIARWLSTLEISG

SEQ ID NO: 2114 - protein, 277 aa, Synthetic construct
MFHYVDVGPRDGTPVLFLHGNPTSSYVWRNIIPHVAPTHRCIAPDLIGMGKSDKPDLGYFFDDHVRFMDAFIEALGLEEVVLVIHDWGSALGFHWAKRNPERVKGIAFMEFIRPIPTWDEWPEFARETFQAFRTTDVGRKLIIDQNVFIEGTLPMMVVRPLTEVEMDHYREPFLNPVDREPLWRFPNELPIAGEPANIVALVEEYMDWLHQSPVPKLLFWGTPGVLIPPAEAARLAKSLPNCKAVDIGPGLNLLQEDNPDLIGSEIARWLSTLEISG

SEQ ID NO: 2115 - protein, 277 aa, Synthetic construct
MFHYVDVGPRDGTPVLFLHGNPTSSYVWRNIIPHVAPTHRCIAPDLIGMGKSDKPDLGYFFDDHVRFMDAFIEALGLEEVVLVIHDWGSALGFHWAKRNPERVKGIAFMEFIRPIPTWDEWPEFARETFQAFRTTDVGRKLIIDQNVFIEGTLPMLVVRPLTEVEMDHYREPFLNPVDREPLWRFPNELPIAGEPANIVALVEEYMDWLHQSPVPKLLFWGTPGVLIPPAEAARLAKSLPNCKAVDIGPGLNLLQEDNPDLIGSEIARWLSTLEISG

SEQ ID NO: 2116 - protein, 277 aa, Synthetic construct
MFHYVDVGPRDGTPVLFLHGNPTSSYVWRNIIPHVAPTHRCIAPDLIGMGKSDKPDLGYFFDDHVRFMDAFIEALGLEEVVLVIHDWGSALGFHWAKRNPERVKGIAFMEFIRPIPTWDEWPEFARETFQAFRTTDVGRKLIIDQNVFIEGTLPMNVVRPLTEVEMDHYREPFLNPVDREPLWRFPNELPIAGEPANIVALVEEYMDWLHQSPVPKLLFWGTPGVLIPPAEAARLAKSLPNCKAVDIGPGLNLLQEDNPDLIGSEIARWLSTLEISG

SEQ ID NO: 2117 - protein, 277 aa, Synthetic construct
MFHYVDVGPRDGTPVLFLHGNPTSSYVWRNIIPHVAPTHRCIAPDLIGMGKSDKPDLGYFFDDHVRFMDAFIEALGLEEVVLVIHDWGSALGFHWAKRNPERVKGIAFMEFIRPIPTWDEWPEFARETFQAFRTTDVGRKLIIDQNVFIEGTLPMGIVRPLTEVEMDHYREPFLNPVDREPLWRFPNELPIAGEPANIVALVEEYMDWLHQSPVPKLLFWGTPGVLIPPAEAARLAKSLPNCKAVDIGPGLNLLQEDNPDLIGSEIARWLSTLEISG

SEQ ID NO: 2118 - protein, 277 aa, Synthetic construct
MFHYVDVGPRDGTPVLFLHGNPTSSYVWRNIIPHVAPTHRCIAPDLIGMGKSDKPDLGYFFDDHVRFMDAFIEALGLEEVVLVIHDWGSALGFHWAKRNPERVKGIAFMEFIRPIPTWDEWPEFARETFQAFRTTDVGRKLIIDQNVFIEGTLPMGLVRPLTEVEMDHYREPFLNPVDREPLWRFPNELPIAGEPANIVALVEEYMDWLHQSPVPKLLFWGTPGVLIPPAEAARLAKSLPNCKAVDIGPGLNLLQEDNPDLIGSEIARWLSTLEISG

SEQ ID NO: 2119 - protein, 277 aa, Synthetic construct
MFHYVDVGPRDGTPVLFLHGNPTSSYVWRNIIPHVAPTHRCIAPDLIGMGKSDKPDLGYFFDDHVRFMDAFIEALGLEEVVLVIHDWGSALGFHWAKRNPERVKGIAFMEFIRPIPTWDEWPEFARETFQAFRTTDVGRKLIIDQNVFIEGTLPMGAVRPLTEVEMDHYREPFLNPVDREPLWRFPNELPIAGEPANIVALVEEYMDWLHQSPVPKLLFWGTPGVLIPPAEAARLAKSLPNCKAVDIGPGLNLLQEDNPDLIGSEIARWLSTLEISG

SEQ ID NO: 2120 - protein, 277 aa, Synthetic construct
MFHYVDVGPRDGTPVLFLHGNPTSSYVWRNIIPHVAPTHRCIAPDLIGMGKSDKPDLGYFFDDHVRFMDAFIEALGLEEVVLVIHDWGSALGFHWAKRNPERVKGIAFMEFIRPIPTWDEWPEFARETFQAFRTTDVGRKLIIDQNVFIEGTLPMGTVRPLTEVEMDHYREPFLNPVDREPLWRFPNELPIAGEPANIVALVEEYMDWLHQSPVPKLLFWGTPGVLIPPAEAARLAKSLPNCKAVDIGPGLNLLQEDNPDLIGSEIARWLSTLEISG

SEQ ID NO: 2121 - protein, 277 aa, Synthetic construct
MFHYVDVGPRDGTPVLFLHGNPTSSYVWRNIIPHVAPTHRCIAPDLIGMGKSDKPDLGYFFDDHVRFMDAFIEALGLEEVVLVIHDWGSALGFHWAKRNPERVKGIAFMEFIRPIPTWDEWPEFARETFQAFRTTDVGRKLIIDQNVFIEGTLPMGMVRPLTEVEMDHYREPFLNPVDREPLWRFPNELPIAGEPANIVALVEEYMDWLHQSPVPKLLFWGTPGVLIPPAEAARLAKSLPNCKAVDIGPGLNLLQEDNPDLIGSEIARWLSTLEISG

SEQ ID NO: 2122 - protein, 277 aa, Synthetic construct
MFHYVDVGPRDGTPVLFLHGNPTSSYVWRNIIPHVAPTHRCIAPDLIGMGKSDKPDLGYFFDDHVRFMDAFIEALGLEEVVLVIHDWGSALGFHWAKRNPERVKGIAFMEFIRPIPTWDEWPEFARETFQAFRTTDVGRKLIIDQNVFIEGTLPMGSVRPLTEVEMDHYREPFLNPVDREPLWRFPNELPIAGEPANIVALVEEYMDWLHQSPVPKLLFWGTPGVLIPPAEAARLAKSLPNCKAVDIGPGLNLLQEDNPDLIGSEIARWLSTLEISG

SEQ ID NO: 2123 - protein, 277 aa, Synthetic construct
MFHYVDVGPRDGTPVLFLHGNPTSSYVWRNIIPHVAPTHRCIAPDLIGMGKSDKPDLGYFFDDHVRFMDAFIEALGLEEVVLVIHDWGSALGFHWAKRNPERVKGIAFMEFIRPIPTWDEWPEFARETFQAFRTTDVGRKLIIDQNVFIEGTLPMGVLRPLTEVEMDHYREPFLNPVDREPLWRFPNELPIAGEPANIVALVEEYMDWLHQSPVPKLLFWGTPGVLIPPAEAARLAKSLPNCKAVDIGPGLNLLQEDNPDLIGSEIARWLSTLEISG

SEQ ID NO: 2124 - protein, 277 aa, Synthetic construct
MFHYVDVGPRDGTPVLFLHGNPTSSYVWRNIIPHVAPTHRCIAPDLIGMGKSDKPDLGYFFDDHVRFMDAFIEALGLEEVVLVIHDWGSALGFHWAKRNPERVKGIAFMEFIRPIPTWDEWPEFARETFQAFRTTDVGRKLIIDQNVFIEGTLPMGVIRPLTEVEMDHYREPFLNPVDREPLWRFPNELPIAGEPANIVALVEEYMDWLHQSPVPKLLFWGTPGVLIPPAEAARLAKSLPNCKAVDIGPGLNLLQEDNPDLIGSEIARWLSTLEISG

SEQ ID NO: 2125 - protein, 277 aa, Synthetic construct
MFHYVDVGPRDGTPVLFLHGNPTSSYVWRNIIPHVAPTHRCIAPDLIGMGKSDKPDLGYFFDDHVRFMDAFIEALGLEEVVLVIHDWGSALGFHWAKRNPERVKGIAFMEFIRPIPTWDEWPEFARETFQAFRTTDVGRKLIIDQNVFIEGTLPMGVMRPLTEVEMDHYREPFLNPVDREPLWRFPNELPIAGEPANIVALVEEYMDWLHQSPVPKLLFWGTPGVLIPPAEAARLAKSLPNCKAVDIGPGLNLLQEDNPDLIGSEIARWLSTLEISG

SEQ ID NO: 2126 - protein, 277 aa, Synthetic construct
MFHYVDVGPRDGTPVLFLHGNPTSSYVWRNIIPHVAPTHRCIAPDLIGMGKSDKPDLGYFFDDHVRFMDAFIEALGLEEVVLVIHDWGSALGFHWAKRNPERVKGIAFMEFIRPIPTWDEWPEFARETFQAFRTTDVGRKLIIDQNVFIEGTLPMGVARPLTEVEMDHYREPFLNPVDREPLWRFPNELPIAGEPANIVALVEEYMDWLHQSPVPKLLFWGTPGVLIPPAEAARLAKSLPNCKAVDIGPGLNLLQEDNPDLIGSEIARWLSTLEISG

SEQ ID NO: 2127 - protein, 277 aa, Synthetic construct
MFHYVDVGPRDGTPVLFLHGNPTSSYVWRNIIPHVAPTHRCIAPDLIGMGKSDKPDLGYFFDDHVRFMDAFIEALGLEEVVLVIHDWGSALGFHWAKRNPERVKGIAFMEFIRPIPTWDEWPEFARETFQAFRTTDVGRKLIIDQNVFIEGTLPMGVTRPLTEVEMDHYREPFLNPVDREPLWRFPNELPIAGEPANIVALVEEYMDWLHQSPVPKLLFWGTPGVLIPPAEAARLAKSLPNCKAVDIGPGLNLLQEDNPDLIGSEIARWLSTLEISG

SEQ ID NO: 2128 - protein, 277 aa, Synthetic construct
MFHYVDVGPRDGTPVLFLHGNPTSSYVWRNIIPHVAPTHRCIAPDLIGMGKSDKPDLGYFFDDHVRFMDAFIEALGLEEVVLVIHDWGSALGFHWAKRNPERVKGIAFMEFIRPIPTWDEWPEFARETFQAFRTTDVGRKLIIDQNVFIEGTLPMGVRRPLTEVEMDHYREPFLNPVDREPLWRFPNELPIAGEPANIVALVEEYMDWLHQSPVPKLLFWGTPGVLIPPAEAARLAKSLPNCKAVDIGPGLNLLQEDNPDLIGSEIARWLSTLEISG

SEQ ID NO: 2129 - protein, 277 aa, Synthetic construct
MFHYVDVGPRDGTPVLFLHGNPTSSYVWRNIIPHVAPTHRCIAPDLIGMGKSDKPDLGYFFDDHVRFMDAFIEALGLEEVVLVIHDWGSALGFHWAKRNPERVKGIAFMEFIRPIPTWDEWPEFARETFQAFRTTDVGRKLIIDQNVFIEGTLPMGVVKPLTEVEMDHYREPFLNPVDREPLWRFPNELPIAGEPANIVALVEEYMDWLHQSPVPKLLFWGTPGVLIPPAEAARLAKSLPNCKAVDIGPGLNLLQEDNPDLIGSEIARWLSTLEISG

SEQ ID NO: 2130 - protein, 277 aa, Synthetic construct
MFHYVDVGPRDGTPVLFLHGNPTSSYVWRNIIPHVAPTHRCIAPDLIGMGKSDKPDLGYFFDDHVRFMDAFIEALGLEEVVLVIHDWGSALGFHWAKRNPERVKGIAFMEFIRPIPTWDEWPEFARETFQAFRTTDVGRKLIIDQNVFIEGTLPMGVVHPLTEVEMDHYREPFLNPVDREPLWRFPNELPIAGEPANIVALVEEYMDWLHQSPVPKLLFWGTPGVLIPPAEAARLAKSLPNCKAVDIGPGLNLLQEDNPDLIGSEIARWLSTLEISG

SEQ ID NO: 2131 - protein, 277 aa, Synthetic construct
MFHYVDVGPRDGTPVLFLHGNPTSSYVWRNIIPHVAPTHRCIAPDLIGMGKSDKPDLGYFFDDHVRFMDAFIEALGLEEVVLVIHDWGSALGFHWAKRNPERVKGIAFMEFIRPIPTWDEWPEFARETFQAFRTTDVGRKLIIDQNVFIEGTLPMGVVSPLTEVEMDHYREPFLNPVDREPLWRFPNELPIAGEPANIVALVEEYMDWLHQSPVPKLLFWGTPGVLIPPAEAARLAKSLPNCKAVDIGPGLNLLQEDNPDLIGSEIARWLSTLEISG

SEQ ID NO: 2132 - protein, 277 aa, Synthetic construct
MFHYVDVGPRDGTPVLFLHGNPTSSYVWRNIIPHVAPTHRCIAPDLIGMGKSDKPDLGYFFDDHVRFMDAFIEALGLEEVVLVIHDWGSALGFHWAKRNPERVKGIAFMEFIRPIPTWDEWPEFARETFQAFRTTDVGRKLIIDQNVFIEGTLPMGVVNPLTEVEMDHYREPFLNPVDREPLWRFPNELPIAGEPANIVALVEEYMDWLHQSPVPKLLFWGTPGVLIPPAEAARLAKSLPNCKAVDIGPGLNLLQEDNPDLIGSEIARWLSTLEISG

SEQ ID NO: 2133 - protein, 277 aa, Synthetic construct
MFHYVDVGPRDGTPVLFLHGNPTSSYVWRNIIPHVAPTHRCIAPDLIGMGKSDKPDLGYFFDDHVRFMDAFIEALGLEEVVLVIHDWGSALGFHWAKRNPERVKGIAFMEFIRPIPTWDEWPEFARETFQAFRTTDVGRKLIIDQNVFIEGTLPMGVVQPLTEVEMDHYREPFLNPVDREPLWRFPNELPIAGEPANIVALVEEYMDWLHQSPVPKLLFWGTPGVLIPPAEAARLAKSLPNCKAVDIGPGLNLLQEDNPDLIGSEIARWLSTLEISG

SEQ ID NO: 2134 - protein, 277 aa, Synthetic construct
MFHYVDVGPRDGTPVLFLHGNPTSSYVWRNIIPHVAPTHRCIAPDLIGMGKSDKPDLGYFFDDHVRFMDAFIEALGLEEVVLVIHDWGSALGFHWAKRNPERVKGIAFMEFIRPIPTWDEWPEFARETFQAFRTTDVGRKLIIDQNVFIEGTLPMGVVTPLTEVEMDHYREPFLNPVDREPLWRFPNELPIAGEPANIVALVEEYMDWLHQSPVPKLLFWGTPGVLIPPAEAARLAKSLPNCKAVDIGPGLNLLQEDNPDLIGSEIARWLSTLEISG

SEQ ID NO: 2135 - protein, 277 aa, Synthetic construct
MFHYVDVGPRDGTPVLFLHGNPTSSYVWRNIIPHVAPTHRCIAPDLIGMGKSDKPDLGYFFDDHVRFMDAFIEALGLEEVVLVIHDWGSALGFHWAKRNPERVKGIAFMEFIRPIPTWDEWPEFARETFQAFRTTDVGRKLIIDQNVFIEGTLPMGVVRDLTEVEMDHYREPFLNPVDREPLWRFPNELPIAGEPANIVALVEEYMDWLHQSPVPKLLFWGTPGVLIPPAEAARLAKSLPNCKAVDIGPGLNLLQEDNPDLIGSEIARWLSTLEISG

SEQ ID NO: 2136 - protein, 277 aa, Synthetic construct
MFHYVDVGPRDGTPVLFLHGNPTSSYVWRNIIPHVAPTHRCIAPDLIGMGKSDKPDLGYFFDDHVRFMDAFIEALGLEEVVLVIHDWGSALGFHWAKRNPERVKGIAFMEFIRPIPTWDEWPEFARETFQAFRTTDVGRKLIIDQNVFIEGTLPMGVVRELTEVEMDHYREPFLNPVDREPLWRFPNELPIAGEPANIVALVEEYMDWLHQSPVPKLLFWGTPGVLIPPAEAARLAKSLPNCKAVDIGPGLNLLQEDNPDLIGSEIARWLSTLEISG

SEQ ID NO: 2137 - protein, 277 aa, Synthetic construct
MFHYVDVGPRDGTPVLFLHGNPTSSYVWRNIIPHVAPTHRCIAPDLIGMGKSDKPDLGYFFDDHVRFMDAFIEALGLEEVVLVIHDWGSALGFHWAKRNPERVKGIAFMEFIRPIPTWDEWPEFARETFQAFRTTDVGRKLIIDQNVFIEGTLPMGVVRNLTEVEMDHYREPFLNPVDREPLWRFPNELPIAGEPANIVALVEEYMDWLHQSPVPKLLFWGTPGVLIPPAEAARLAKSLPNCKAVDIGPGLNLLQEDNPDLIGSEIARWLSTLEISG

SEQ ID NO: 2138 - protein, 277 aa, Synthetic construct
MFHYVDVGPRDGTPVLFLHGNPTSSYVWRNIIPHVAPTHRCIAPDLIGMGKSDKPDLGYFFDDHVRFMDAFIEALGLEEVVLVIHDWGSALGFHWAKRNPERVKGIAFMEFIRPIPTWDEWPEFARETFQAFRTTDVGRKLIIDQNVFIEGTLPMGVVRGLTEVEMDHYREPFLNPVDREPLWRFPNELPIAGEPANIVALVEEYMDWLHQSPVPKLLFWGTPGVLIPPAEAARLAKSLPNCKAVDIGPGLNLLQEDNPDLIGSEIARWLSTLEISG

SEQ ID NO: 2139 - protein, 277 aa, Synthetic construct
MFHYVDVGPRDGTPVLFLHGNPTSSYVWRNIIPHVAPTHRCIAPDLIGMGKSDKPDLGYFFDDHVRFMDAFIEALGLEEVVLVIHDWGSALGFHWAKRNPERVKGIAFMEFIRPIPTWDEWPEFARETFQAFRTTDVGRKLIIDQNVFIEGTLPMGVVRSLTEVEMDHYREPFLNPVDREPLWRFPNELPIAGEPANIVALVEEYMDWLHQSPVPKLLFWGTPGVLIPPAEAARLAKSLPNCKAVDIGPGLNLLQEDNPDLIGSEIARWLSTLEISG

SEQ ID NO: 2140 - protein, 277 aa, Synthetic construct
MFHYVDVGPRDGTPVLFLHGNPTSSYVWRNIIPHVAPTHRCIAPDLIGMGKSDKPDLGYFFDDHVRFMDAFIEALGLEEVVLVIHDWGSALGFHWAKRNPERVKGIAFMEFIRPIPTWDEWPEFARETFQAFRTTDVGRKLIIDQNVFIEGTLPMGVVRPITEVEMDHYREPFLNPVDREPLWRFPNELPIAGEPANIVALVEEYMDWLHQSPVPKLLFWGTPGVLIPPAEAARLAKSLPNCKAVDIGPGLNLLQEDNPDLIGSEIARWLSTLEISG

SEQ ID NO: 2141 - protein, 277 aa, Synthetic construct
MFHYVDVGPRDGTPVLFLHGNPTSSYVWRNIIPHVAPTHRCIAPDLIGMGKSDKPDLGYFFDDHVRFMDAFIEALGLEEVVLVIHDWGSALGFHWAKRNPERVKGIAFMEFIRPIPTWDEWPEFARETFQAFRTTDVGRKLIIDQNVFIEGTLPMGVVRPFTEVEMDHYREPFLNPVDREPLWRFPNELPIAGEPANIVALVEEYMDWLHQSPVPKLLFWGTPGVLIPPAEAARLAKSLPNCKAVDIGPGLNLLQEDNPDLIGSEIARWLSTLEISG

SEQ ID NO: 2142 - protein, 277 aa, Synthetic construct
MFHYVDVGPRDGTPVLFLHGNPTSSYVWRNIIPHVAPTHRCIAPDLIGMGKSDKPDLGYFFDDHVRFMDAFIEALGLEEVVLVIHDWGSALGFHWAKRNPERVKGIAFMEFIRPIPTWDEWPEFARETFQAFRTTDVGRKLIIDQNVFIEGTLPMGVVRPVTEVEMDHYREPFLNPVDREPLWRFPNELPIAGEPANIVALVEEYMDWLHQSPVPKLLFWGTPGVLIPPAEAARLAKSLPNCKAVDIGPGLNLLQEDNPDLIGSEIARWLSTLEISG

SEQ ID NO: 2143 - protein, 277 aa, Synthetic construct
MFHYVDVGPRDGTPVLFLHGNPTSSYVWRNIIPHVAPTHRCIAPDLIGMGKSDKPDLGYFFDDHVRFMDAFIEALGLEEVVLVIHDWGSALGFHWAKRNPERVKGIAFMEFIRPIPTWDEWPEFARETFQAFRTTDVGRKLIIDQNVFIEGTLPMGVVRPPTEVEMDHYREPFLNPVDREPLWRFPNELPIAGEPANIVALVEEYMDWLHQSPVPKLLFWGTPGVLIPPAEAARLAKSLPNCKAVDIGPGLNLLQEDNPDLIGSEIARWLSTLEISG

SEQ ID NO: 2144 - protein, 277 aa, Synthetic construct
MFHYVDVGPRDGTPVLFLHGNPTSSYVWRNIIPHVAPTHRCIAPDLIGMGKSDKPDLGYFFDDHVRFMDAFIEALGLEEVVLVIHDWGSALGFHWAKRNPERVKGIAFMEFIRPIPTWDEWPEFARETFQAFRTTDVGRKLIIDQNVFIEGTLPMGVVRPATEVEMDHYREPFLNPVDREPLWRFPNELPIAGEPANIVALVEEYMDWLHQSPVPKLLFWGTPGVLIPPAEAARLAKSLPNCKAVDIGPGLNLLQEDNPDLIGSEIARWLSTLEISG

SEQ ID NO: 2145 - protein, 277 aa, Synthetic construct
MFHYVDVGPRDGTPVLFLHGNPTSSYVWRNIIPHVAPTHRCIAPDLIGMGKSDKPDLGYFFDDHVRFMDAFIEALGLEEVVLVIHDWGSALGFHWAKRNPERVKGIAFMEFIRPIPTWDEWPEFARETFQAFRTTDVGRKLIIDQNVFIEGTLPMGVVRPLSEVEMDHYREPFLNPVDREPLWRFPNELPIAGEPANIVALVEEYMDWLHQSPVPKLLFWGTPGVLIPPAEAARLAKSLPNCKAVDIGPGLNLLQEDNPDLIGSEIARWLSTLEISG

SEQ ID NO: 2146 - protein, 277 aa, Synthetic construct
MFHYVDVGPRDGTPVLFLHGNPTSSYVWRNIIPHVAPTHRCIAPDLIGMGKSDKPDLGYFFDDHVRFMDAFIEALGLEEVVLVIHDWGSALGFHWAKRNPERVKGIAFMEFIRPIPTWDEWPEFARETFQAFRTTDVGRKLIIDQNVFIEGTLPMGVVRPLDEVEMDHYREPFLNPVDREPLWRFPNELPIAGEPANIVALVEEYMDWLHQSPVPKLLFWGTPGVLIPPAEAARLAKSLPNCKAVDIGPGLNLLQEDNPDLIGSEIARWLSTLEISG

SEQ ID NO: 2147 - protein, 277 aa, Synthetic construct
MFHYVDVGPRDGTPVLFLHGNPTSSYVWRNIIPHVAPTHRCIAPDLIGMGKSDKPDLGYFFDDHVRFMDAFIEALGLEEVVLVIHDWGSALGFHWAKRNPERVKGIAFMEFIRPIPTWDEWPEFARETFQAFRTTDVGRKLIIDQNVFIEGTLPMGVVRPLGEVEMDHYREPFLNPVDREPLWRFPNELPIAGEPANIVALVEEYMDWLHQSPVPKLLFWGTPGVLIPPAEAARLAKSLPNCKAVDIGPGLNLLQEDNPDLIGSEIARWLSTLEISG

SEQ ID NO: 2148 - protein, 277 aa, Synthetic construct
MFHYVDVGPRDGTPVLFLHGNPTSSYVWRNIIPHVAPTHRCIAPDLIGMGKSDKPDLGYFFDDHVRFMDAFIEALGLEEVVLVIHDWGSALGFHWAKRNPERVKGIAFMEFIRPIPTWDEWPEFARETFQAFRTTDVGRKLIIDQNVFIEGTLPMGVVRPLNEVEMDHYREPFLNPVDREPLWRFPNELPIAGEPANIVALVEEYMDWLHQSPVPKLLFWGTPGVLIPPAEAARLAKSLPNCKAVDIGPGLNLLQEDNPDLIGSEIARWLSTLEISG

SEQ ID NO: 2149 - protein, 277 aa, Synthetic construct
MFHYVDVGPRDGTPVLFLHGNPTSSYVWRNIIPHVAPTHRCIAPDLIGMGKSDKPDLGYFFDDHVRFMDAFIEALGLEEVVLVIHDWGSALGFHWAKRNPERVKGIAFMEFIRPIPTWDEWPEFARETFQAFRTTDVGRKLIIDQNVFIEGTLPMGVVRPLAEVEMDHYREPFLNPVDREPLWRFPNELPIAGEPANIVALVEEYMDWLHQSPVPKLLFWGTPGVLIPPAEAARLAKSLPNCKAVDIGPGLNLLQEDNPDLIGSEIARWLSTLEISG

SEQ ID NO: 2150 - protein, 277 aa, Synthetic construct
MFHYVDVGPRDGTPVLFLHGNPTSSYVWRNIIPHVAPTHRCIAPDLIGMGKSDKPDLGYFFDDHVRFMDAFIEALGLEEVVLVIHDWGSALGFHWAKRNPERVKGIAFMEFIRPIPTWDEWPEFARETFQAFRTTDVGRKLIIDQNVFIEGTLPMGVVRPLPEVEMDHYREPFLNPVDREPLWRFPNELPIAGEPANIVALVEEYMDWLHQSPVPKLLFWGTPGVLIPPAEAARLAKSLPNCKAVDIGPGLNLLQEDNPDLIGSEIARWLSTLEISG

SEQ ID NO: 2151 - protein, 277 aa, Synthetic construct
MFHYVDVGPRDGTPVLFLHGNPTSSYVWRNIIPHVAPTHRCIAPDLIGMGKSDKPDLGYFFDDHVRFMDAFIEALGLEEVVLVIHDWGSALGFHWAKRNPERVKGIAFMEFIRPIPTWDEWPEFARETFQAFRTTDVGRKLIIDQNVFIEGTLPMGVVRPLTDVEMDHYREPFLNPVDREPLWRFPNELPIAGEPANIVALVEEYMDWLHQSPVPKLLFWGTPGVLIPPAEAARLAKSLPNCKAVDIGPGLNLLQEDNPDLIGSEIARWLSTLEISG

SEQ ID NO: 2152 - protein, 277 aa, Synthetic construct
MFHYVDVGPRDGTPVLFLHGNPTSSYVWRNIIPHVAPTHRCIAPDLIGMGKSDKPDLGYFFDDHVRFMDAFIEALGLEEVVLVIHDWGSALGFHWAKRNPERVKGIAFMEFIRPIPTWDEWPEFARETFQAFRTTDVGRKLIIDQNVFIEGTLPMGVVRPLTPVEMDHYREPFLNPVDREPLWRFPNELPIAGEPANIVALVEEYMDWLHQSPVPKLLFWGTPGVLIPPAEAARLAKSLPNCKAVDIGPGLNLLQEDNPDLIGSEIARWLSTLEISG

SEQ ID NO: 2153 - protein, 277 aa, Synthetic construct
MFHYVDVGPRDGTPVLFLHGNPTSSYVWRNIIPHVAPTHRCIAPDLIGMGKSDKPDLGYFFDDHVRFMDAFIEALGLEEVVLVIHDWGSALGFHWAKRNPERVKGIAFMEFIRPIPTWDEWPEFARETFQAFRTTDVGRKLIIDQNVFIEGTLPMGVVRPLTQVEMDHYREPFLNPVDREPLWRFPNELPIAGEPANIVALVEEYMDWLHQSPVPKLLFWGTPGVLIPPAEAARLAKSLPNCKAVDIGPGLNLLQEDNPDLIGSEIARWLSTLEISG

SEQ ID NO: 2154 - protein, 277 aa, Synthetic construct
MFHYVDVGPRDGTPVLFLHGNPTSSYVWRNIIPHVAPTHRCIAPDLIGMGKSDKPDLGYFFDDHVRFMDAFIEALGLEEVVLVIHDWGSALGFHWAKRNPERVKGIAFMEFIRPIPTWDEWPEFARETFQAFRTTDVGRKLIIDQNVFIEGTLPMGVVRPLTAVEMDHYREPFLNPVDREPLWRFPNELPIAGEPANIVALVEEYMDWLHQSPVPKLLFWGTPGVLIPPAEAARLAKSLPNCKAVDIGPGLNLLQEDNPDLIGSEIARWLSTLEISG

SEQ ID NO: 2155 - protein, 277 aa, Synthetic construct
MFHYVDVGPRDGTPVLFLHGNPTSSYVWRNIIPHVAPTHRCIAPDLIGMGKSDKPDLGYFFDDHVRFMDAFIEALGLEEVVLVIHDWGSALGFHWAKRNPERVKGIAFMEFIRPIPTWDEWPEFARETFQAFRTTDVGRKLIIDQNVFIEGTLPMGVVRPLTKVEMDHYREPFLNPVDREPLWRFPNELPIAGEPANIVALVEEYMDWLHQSPVPKLLFWGTPGVLIPPAEAARLAKSLPNCKAVDIGPGLNLLQEDNPDLIGSEIARWLSTLEISG

SEQ ID NO: 2156 - protein, 277 aa, Synthetic construct
MFHYVDVGPRDGTPVLFLHGNPTSSYVWRNIIPHVAPTHRCIAPDLIGMGKSDKPDLGYFFDDHVRFMDAFIEALGLEEVVLVIHDWGSALGFHWAKRNPERVKGIAFMEFIRPIPTWDEWPEFARETFQAFRTTDVGRKLIIDQNVFIEGTLPMGVVRPLTSVEMDHYREPFLNPVDREPLWRFPNELPIAGEPANIVALVEEYMDWLHQSPVPKLLFWGTPGVLIPPAEAARLAKSLPNCKAVDIGPGLNLLQEDNPDLIGSEIARWLSTLEISG

SEQ ID NO: 2157 - protein, 277 aa, Synthetic construct
MFHYVDVGPRDGTPVLFLHGNPTSSYVWRNIIPHVAPTHRCIAPDLIGMGKSDKPDLGYFFDDHVRFMDAFIEALGLEEVVLVIHDWGSALGFHWAKRNPERVKGIAFMEFIRPIPTWDEWPEFARETFQAFRTTDVGRKLIIDQNVFIEGTLPMGVVRPLTEAEMDHYREPFLNPVDREPLWRFPNELPIAGEPANIVALVEEYMDWLHQSPVPKLLFWGTPGVLIPPAEAARLAKSLPNCKAVDIGPGLNLLQEDNPDLIGSEIARWLSTLEISG

SEQ ID NO: 2158 - protein, 277 aa, Synthetic construct
MFHYVDVGPRDGTPVLFLHGNPTSSYVWRNIIPHVAPTHRCIAPDLIGMGKSDKPDLGYFFDDHVRFMDAFIEALGLEEVVLVIHDWGSALGFHWAKRNPERVKGIAFMEFIRPIPTWDEWPEFARETFQAFRTTDVGRKLIIDQNVFIEGTLPMGVVRPLTEEEMDHYREPFLNPVDREPLWRFPNELPIAGEPANIVALVEEYMDWLHQSPVPKLLFWGTPGVLIPPAEAARLAKSLPNCKAVDIGPGLNLLQEDNPDLIGSEIARWLSTLEISG

SEQ ID NO: 2159 - protein, 277 aa, Synthetic construct
MFHYVDVGPRDGTPVLFLHGNPTSSYVWRNIIPHVAPTHRCIAPDLIGMGKSDKPDLGYFFDDHVRFMDAFIEALGLEEVVLVIHDWGSALGFHWAKRNPERVKGIAFMEFIRPIPTWDEWPEFARETFQAFRTTDVGRKLIIDQNVFIEGTLPMGVVRPLTEQEMDHYREPFLNPVDREPLWRFPNELPIAGEPANIVALVEEYMDWLHQSPVPKLLFWGTPGVLIPPAEAARLAKSLPNCKAVDIGPGLNLLQEDNPDLIGSEIARWLSTLEISG

SEQ ID NO: 2160 - protein, 277 aa, Synthetic construct
MFHYVDVGPRDGTPVLFLHGNPTSSYVWRNIIPHVAPTHRCIAPDLIGMGKSDKPDLGYFFDDHVRFMDAFIEALGLEEVVLVIHDWGSALGFHWAKRNPERVKGIAFMEFIRPIPTWDEWPEFARETFQAFRTTDVGRKLIIDQNVFIEGTLPMGVVRPLTEDEMDHYREPFLNPVDREPLWRFPNELPIAGEPANIVALVEEYMDWLHQSPVPKLLFWGTPGVLIPPAEAARLAKSLPNCKAVDIGPGLNLLQEDNPDLIGSEIARWLSTLEISG

SEQ ID NO: 2161 - protein, 277 aa, Synthetic construct
MFHYVDVGPRDGTPVLFLHGNPTSSYVWRNIIPHVAPTHRCIAPDLIGMGKSDKPDLGYFFDDHVRFMDAFIEALGLEEVVLVIHDWGSALGFHWAKRNPERVKGIAFMEFIRPIPTWDEWPEFARETFQAFRTTDVGRKLIIDQNVFIEGTLPMGVVRPLTESEMDHYREPFLNPVDREPLWRFPNELPIAGEPANIVALVEEYMDWLHQSPVPKLLFWGTPGVLIPPAEAARLAKSLPNCKAVDIGPGLNLLQEDNPDLIGSEIARWLSTLEISG

SEQ ID NO: 2162 - protein, 277 aa, Synthetic construct
MFHYVDVGPRDGTPVLFLHGNPTSSYVWRNIIPHVAPTHRCIAPDLIGMGKSDKPDLGYFFDDHVRFMDAFIEALGLEEVVLVIHDWGSALGFHWAKRNPERVKGIAFMEFIRPIPTWDEWPEFARETFQAFRTTDVGRKLIIDQNVFIEGTLPMGVVRPLTETEMDHYREPFLNPVDREPLWRFPNELPIAGEPANIVALVEEYMDWLHQSPVPKLLFWGTPGVLIPPAEAARLAKSLPNCKAVDIGPGLNLLQEDNPDLIGSEIARWLSTLEISG

SEQ ID NO: 2163 - protein, 277 aa, Synthetic construct
MFHYVDVGPRDGTPVLFLHGNPTSSYVWRNIIPHVAPTHRCIAPDLIGMGKSDKPDLGYFFDDHVRFMDAFIEALGLEEVVLVIHDWGSALGFHWAKRNPERVKGIAFMEFIRPIPTWDEWPEFARETFQAFRTTDVGRKLIIDQNVFIEGTLPMGVVRPLTEVDMDHYREPFLNPVDREPLWRFPNELPIAGEPANIVALVEEYMDWLHQSPVPKLLFWGTPGVLIPPAEAARLAKSLPNCKAVDIGPGLNLLQEDNPDLIGSEIARWLSTLEISG

SEQ ID NO: 2164 - protein, 277 aa, Synthetic construct
MFHYVDVGPRDGTPVLFLHGNPTSSYVWRNIIPHVAPTHRCIAPDLIGMGKSDKPDLGYFFDDHVRFMDAFIEALGLEEVVLVIHDWGSALGFHWAKRNPERVKGIAFMEFIRPIPTWDEWPEFARETFQAFRTTDVGRKLIIDQNVFIEGTLPMGVVRPLTEVQMDHYREPFLNPVDREPLWRFPNELPIAGEPANIVALVEEYMDWLHQSPVPKLLFWGTPGVLIPPAEAARLAKSLPNCKAVDIGPGLNLLQEDNPDLIGSEIARWLSTLEISG

SEQ ID NO: 2165 - protein, 277 aa, Synthetic construct
MFHYVDVGPRDGTPVLFLHGNPTSSYVWRNIIPHVAPTHRCIAPDLIGMGKSDKPDLGYFFDDHVRFMDAFIEALGLEEVVLVIHDWGSALGFHWAKRNPERVKGIAFMEFIRPIPTWDEWPEFARETFQAFRTTDVGRKLIIDQNVFIEGTLPMGVVRPLTEVAMDHYREPFLNPVDREPLWRFPNELPIAGEPANIVALVEEYMDWLHQSPVPKLLFWGTPGVLIPPAEAARLAKSLPNCKAVDIGPGLNLLQEDNPDLIGSEIARWLSTLEISG

SEQ ID NO: 2166 - protein, 277 aa, Synthetic construct
MFHYVDVGPRDGTPVLFLHGNPTSSYVWRNIIPHVAPTHRCIAPDLIGMGKSDKPDLGYFFDDHVRFMDAFIEALGLEEVVLVIHDWGSALGFHWAKRNPERVKGIAFMEFIRPIPTWDEWPEFARETFQAFRTTDVGRKLIIDQNVFIEGTLPMGVVRPLTEVVMDHYREPFLNPVDREPLWRFPNELPIAGEPANIVALVEEYMDWLHQSPVPKLLFWGTPGVLIPPAEAARLAKSLPNCKAVDIGPGLNLLQEDNPDLIGSEIARWLSTLEISG

SEQ ID NO: 2167 - protein, 277 aa, Synthetic construct
MFHYVDVGPRDGTPVLFLHGNPTSSYVWRNIIPHVAPTHRCIAPDLIGMGKSDKPDLGYFFDDHVRFMDAFIEALGLEEVVLVIHDWGSALGFHWAKRNPERVKGIAFMEFIRPIPTWDEWPEFARETFQAFRTTDVGRKLIIDQNVFIEGTLPMGVVRPLTEVTMDHYREPFLNPVDREPLWRFPNELPIAGEPANIVALVEEYMDWLHQSPVPKLLFWGTPGVLIPPAEAARLAKSLPNCKAVDIGPGLNLLQEDNPDLIGSEIARWLSTLEISG

SEQ ID NO: 2168 - protein, 277 aa, Synthetic construct
MFHYVDVGPRDGTPVLFLHGNPTSSYVWRNIIPHVAPTHRCIAPDLIGMGKSDKPDLGYFFDDHVRFMDAFIEALGLEEVVLVIHDWGSALGFHWAKRNPERVKGIAFMEFIRPIPTWDEWPEFARETFQAFRTTDVGRKLIIDQNVFIEGTLPMGVVRPLTEVGMDHYREPFLNPVDREPLWRFPNELPIAGEPANIVALVEEYMDWLHQSPVPKLLFWGTPGVLIPPAEAARLAKSLPNCKAVDIGPGLNLLQEDNPDLIGSEIARWLSTLEISG

SEQ ID NO: 2169 - protein, 277 aa, Synthetic construct
MFHYVDVGPRDGTPVLFLHGNPTSSYVWRNIIPHVAPTHRCIAPDLIGMGKSDKPDLGYFFDDHVRFMDAFIEALGLEEVVLVIHDWGSALGFHWAKRNPERVKGIAFMEFIRPIPTWDEWPEFARETFQAFRTTDVGRKLIIDQNVFIEGTLPMGVVRPLTEVELDHYREPFLNPVDREPLWRFPNELPIAGEPANIVALVEEYMDWLHQSPVPKLLFWGTPGVLIPPAEAARLAKSLPNCKAVDIGPGLNLLQEDNPDLIGSEIARWLSTLEISG

SEQ ID NO: 2170 - protein, 277 aa, Synthetic construct
MFHYVDVGPRDGTPVLFLHGNPTSSYVWRNIIPHVAPTHRCIAPDLIGMGKSDKPDLGYFFDDHVRFMDAFIEALGLEEVVLVIHDWGSALGFHWAKRNPERVKGIAFMEFIRPIPTWDEWPEFARETFQAFRTTDVGRKLIIDQNVFIEGTLPMGVVRPLTEVERDHYREPFLNPVDREPLWRFPNELPIAGEPANIVALVEEYMDWLHQSPVPKLLFWGTPGVLIPPAEAARLAKSLPNCKAVDIGPGLNLLQEDNPDLIGSEIARWLSTLEISG

SEQ ID NO: 2171 - protein, 277 aa, Synthetic construct
MFHYVDVGPRDGTPVLFLHGNPTSSYVWRNIIPHVAPTHRCIAPDLIGMGKSDKPDLGYFFDDHVRFMDAFIEALGLEEVVLVIHDWGSALGFHWAKRNPERVKGIAFMEFIRPIPTWDEWPEFARETFQAFRTTDVGRKLIIDQNVFIEGTLPMGVVRPLTEVEIDHYREPFLNPVDREPLWRFPNELPIAGEPANIVALVEEYMDWLHQSPVPKLLFWGTPGVLIPPAEAARLAKSLPNCKAVDIGPGLNLLQEDNPDLIGSEIARWLSTLEISG

SEQ ID NO: 2172 - protein, 277 aa, Synthetic construct
MFHYVDVGPRDGTPVLFLHGNPTSSYVWRNIIPHVAPTHRCIAPDLIGMGKSDKPDLGYFFDDHVRFMDAFIEALGLEEVVLVIHDWGSALGFHWAKRNPERVKGIAFMEFIRPIPTWDEWPEFARETFQAFRTTDVGRKLIIDQNVFIEGTLPMGVVRPLTEVEKDHYREPFLNPVDREPLWRFPNELPIAGEPANIVALVEEYMDWLHQSPVPKLLFWGTPGVLIPPAEAARLAKSLPNCKAVDIGPGLNLLQEDNPDLIGSEIARWLSTLEISG

SEQ ID NO: 2173 - protein, 277 aa, Synthetic construct
MFHYVDVGPRDGTPVLFLHGNPTSSYVWRNIIPHVAPTHRCIAPDLIGMGKSDKPDLGYFFDDHVRFMDAFIEALGLEEVVLVIHDWGSALGFHWAKRNPERVKGIAFMEFIRPIPTWDEWPEFARETFQAFRTTDVGRKLIIDQNVFIEGTLPMGVVRPLTEVEHDHYREPFLNPVDREPLWRFPNELPIAGEPANIVALVEEYMDWLHQSPVPKLLFWGTPGVLIPPAEAARLAKSLPNCKAVDIGPGLNLLQEDNPDLIGSEIARWLSTLEISG

SEQ ID NO: 2174 - protein, 277 aa, Synthetic construct
MFHYVDVGPRDGTPVLFLHGNPTSSYVWRNIIPHVAPTHRCIAPDLIGMGKSDKPDLGYFFDDHVRFMDAFIEALGLEEVVLVIHDWGSALGFHWAKRNPERVKGIAFMEFIRPIPTWDEWPEFARETFQAFRTTDVGRKLIIDQNVFIEGTLPMGVVRPLTEVEVDHYREPFLNPVDREPLWRFPNELPIAGEPANIVALVEEYMDWLHQSPVPKLLFWGTPGVLIPPAEAARLAKSLPNCKAVDIGPGLNLLQEDNPDLIGSEIARWLSTLEISG

SEQ ID NO: 2175 - protein, 277 aa, Synthetic construct
MFHYVDVGPRDGTPVLFLHGNPTSSYVWRNIIPHVAPTHRCIAPDLIGMGKSDKPDLGYFFDDHVRFMDAFIEALGLEEVVLVIHDWGSALGFHWAKRNPERVKGIAFMEFIRPIPTWDEWPEFARETFQAFRTTDVGRKLIIDQNVFIEGTLPMGVVRPLTEVEMAHYREPFLNPVDREPLWRFPNELPIAGEPANIVALVEEYMDWLHQSPVPKLLFWGTPGVLIPPAEAARLAKSLPNCKAVDIGPGLNLLQEDNPDLIGSEIARWLSTLEISG

SEQ ID NO: 2176 - protein, 277 aa, Synthetic construct
MFHYVDVGPRDGTPVLFLHGNPTSSYVWRNIIPHVAPTHRCIAPDLIGMGKSDKPDLGYFFDDHVRFMDAFIEALGLEEVVLVIHDWGSALGFHWAKRNPERVKGIAFMEFIRPIPTWDEWPEFARETFQAFRTTDVGRKLIIDQNVFIEGTLPMGVVRPLTEVEMEHYREPFLNPVDREPLWRFPNELPIAGEPANIVALVEEYMDWLHQSPVPKLLFWGTPGVLIPPAEAARLAKSLPNCKAVDIGPGLNLLQEDNPDLIGSEIARWLSTLEISG

SEQ ID NO: 2177 - protein, 277 aa, Synthetic construct
MFHYVDVGPRDGTPVLFLHGNPTSSYVWRNIIPHVAPTHRCIAPDLIGMGKSDKPDLGYFFDDHVRFMDAFIEALGLEEVVLVIHDWGSALGFHWAKRNPERVKGIAFMEFIRPIPTWDEWPEFARETFQAFRTTDVGRKLIIDQNVFIEGTLPMGVVRPLTEVEMQHYREPFLNPVDREPLWRFPNELPIAGEPANIVALVEEYMDWLHQSPVPKLLFWGTPGVLIPPAEAARLAKSLPNCKAVDIGPGLNLLQEDNPDLIGSEIARWLSTLEISG

SEQ ID NO: 2178 - protein, 277 aa, Synthetic construct
MFHYVDVGPRDGTPVLFLHGNPTSSYVWRNIIPHVAPTHRCIAPDLIGMGKSDKPDLGYFFDDHVRFMDAFIEALGLEEVVLVIHDWGSALGFHWAKRNPERVKGIAFMEFIRPIPTWDEWPEFARETFQAFRTTDVGRKLIIDQNVFIEGTLPMGVVRPLTEVEMRHYREPFLNPVDREPLWRFPNELPIAGEPANIVALVEEYMDWLHQSPVPKLLFWGTPGVLIPPAEAARLAKSLPNCKAVDIGPGLNLLQEDNPDLIGSEIARWLSTLEISG

SEQ ID NO: 2179 - protein, 277 aa, Synthetic construct
MFHYVDVGPRDGTPVLFLHGNPTSSYVWRNIIPHVAPTHRCIAPDLIGMGKSDKPDLGYFFDDHVRFMDAFIEALGLEEVVLVIHDWGSALGFHWAKRNPERVKGIAFMEFIRPIPTWDEWPEFARETFQAFRTTDVGRKLIIDQNVFIEGTLPMGVVRPLTEVEMKHYREPFLNPVDREPLWRFPNELPIAGEPANIVALVEEYMDWLHQSPVPKLLFWGTPGVLIPPAEAARLAKSLPNCKAVDIGPGLNLLQEDNPDLIGSEIARWLSTLEISG

SEQ ID NO: 2180 - protein, 277 aa, Synthetic construct
MFHYVDVGPRDGTPVLFLHGNPTSSYVWRNIIPHVAPTHRCIAPDLIGMGKSDKPDLGYFFDDHVRFMDAFIEALGLEEVVLVIHDWGSALGFHWAKRNPERVKGIAFMEFIRPIPTWDEWPEFARETFQAFRTTDVGRKLIIDQNVFIEGTLPMGVVRPLTEVEMNHYREPFLNPVDREPLWRFPNELPIAGEPANIVALVEEYMDWLHQSPVPKLLFWGTPGVLIPPAEAARLAKSLPNCKAVDIGPGLNLLQEDNPDLIGSEIARWLSTLEISG

SEQ ID NO: 2181 - protein, 277 aa, Synthetic construct
MFHYVDVGPRDGTPVLFLHGNPTSSYVWRNIIPHVAPTHRCIAPDLIGMGKSDKPDLGYFFDDHVRFMDAFIEALGLEEVVLVIHDWGSALGFHWAKRNPERVKGIAFMEFIRPIPTWDEWPEFARETFQAFRTTDVGRKLIIDQNVFIEGTLPMGVVRPLTEVEMDVYREPFLNPVDREPLWRFPNELPIAGEPANIVALVEEYMDWLHQSPVPKLLFWGTPGVLIPPAEAARLAKSLPNCKAVDIGPGLNLLQEDNPDLIGSEIARWLSTLEISG

SEQ ID NO: 2182 - protein, 277 aa, Synthetic construct
MFHYVDVGPRDGTPVLFLHGNPTSSYVWRNIIPHVAPTHRCIAPDLIGMGKSDKPDLGYFFDDHVRFMDAFIEALGLEEVVLVIHDWGSALGFHWAKRNPERVKGIAFMEFIRPIPTWDEWPEFARETFQAFRTTDVGRKLIIDQNVFIEGTLPMGVVRPLTEVEMDIYREPFLNPVDREPLWRFPNELPIAGEPANIVALVEEYMDWLHQSPVPKLLFWGTPGVLIPPAEAARLAKSLPNCKAVDIGPGLNLLQEDNPDLIGSEIARWLSTLEISG

SEQ ID NO: 2183 - protein, 277 aa, Synthetic construct
MFHYVDVGPRDGTPVLFLHGNPTSSYVWRNIIPHVAPTHRCIAPDLIGMGKSDKPDLGYFFDDHVRFMDAFIEALGLEEVVLVIHDWGSALGFHWAKRNPERVKGIAFMEFIRPIPTWDEWPEFARETFQAFRTTDVGRKLIIDQNVFIEGTLPMGVVRPLTEVEMDRYREPFLNPVDREPLWRFPNELPIAGEPANIVALVEEYMDWLHQSPVPKLLFWGTPGVLIPPAEAARLAKSLPNCKAVDIGPGLNLLQEDNPDLIGSEIARWLSTLEISG

SEQ ID NO: 2184 - protein, 277 aa, Synthetic construct
MFHYVDVGPRDGTPVLFLHGNPTSSYVWRNIIPHVAPTHRCIAPDLIGMGKSDKPDLGYFFDDHVRFMDAFIEALGLEEVVLVIHDWGSALGFHWAKRNPERVKGIAFMEFIRPIPTWDEWPEFARETFQAFRTTDVGRKLIIDQNVFIEGTLPMGVVRPLTEVEMDLYREPFLNPVDREPLWRFPNELPIAGEPANIVALVEEYMDWLHQSPVPKLLFWGTPGVLIPPAEAARLAKSLPNCKAVDIGPGLNLLQEDNPDLIGSEIARWLSTLEISG

SEQ ID NO: 2185 - protein, 277 aa, Synthetic construct
MFHYVDVGPRDGTPVLFLHGNPTSSYVWRNIIPHVAPTHRCIAPDLIGMGKSDKPDLGYFFDDHVRFMDAFIEALGLEEVVLVIHDWGSALGFHWAKRNPERVKGIAFMEFIRPIPTWDEWPEFARETFQAFRTTDVGRKLIIDQNVFIEGTLPMGVVRPLTEVEMDTYREPFLNPVDREPLWRFPNELPIAGEPANIVALVEEYMDWLHQSPVPKLLFWGTPGVLIPPAEAARLAKSLPNCKAVDIGPGLNLLQEDNPDLIGSEIARWLSTLEISG

SEQ ID NO: 2186 - protein, 277 aa, Synthetic construct
MFHYVDVGPRDGTPVLFLHGNPTSSYVWRNIIPHVAPTHRCIAPDLIGMGKSDKPDLGYFFDDHVRFMDAFIEALGLEEVVLVIHDWGSALGFHWAKRNPERVKGIAFMEFIRPIPTWDEWPEFARETFQAFRTTDVGRKLIIDQNVFIEGTLPMGVVRPLTEVEMDHLREPFLNPVDREPLWRFPNELPIAGEPANIVALVEEYMDWLHQSPVPKLLFWGTPGVLIPPAEAARLAKSLPNCKAVDIGPGLNLLQEDNPDLIGSEIARWLSTLEISG

SEQ ID NO: 2187 - protein, 277 aa, Synthetic construct
MFHYVDVGPRDGTPVLFLHGNPTSSYVWRNIIPHVAPTHRCIAPDLIGMGKSDKPDLGYFFDDHVRFMDAFIEALGLEEVVLVIHDWGSALGFHWAKRNPERVKGIAFMEFIRPIPTWDEWPEFARETFQAFRTTDVGRKLIIDQNVFIEGTLPMGVVRPLTEVEMDHWREPFLNPVDREPLWRFPNELPIAGEPANIVALVEEYMDWLHQSPVPKLLFWGTPGVLIPPAEAARLAKSLPNCKAVDIGPGLNLLQEDNPDLIGSEIARWLSTLEISG

SEQ ID NO: 2188 - protein, 277 aa, Synthetic construct
MFHYVDVGPRDGTPVLFLHGNPTSSYVWRNIIPHVAPTHRCIAPDLIGMGKSDKPDLGYFFDDHVRFMDAFIEALGLEEVVLVIHDWGSALGFHWAKRNPERVKGIAFMEFIRPIPTWDEWPEFARETFQAFRTTDVGRKLIIDQNVFIEGTLPMGVVRPLTEVEMDHHREPFLNPVDREPLWRFPNELPIAGEPANIVALVEEYMDWLHQSPVPKLLFWGTPGVLIPPAEAARLAKSLPNCKAVDIGPGLNLLQEDNPDLIGSEIARWLSTLEISG

SEQ ID NO: 2189 - protein, 277 aa, Synthetic construct
MFHYVDVGPRDGTPVLFLHGNPTSSYVWRNIIPHVAPTHRCIAPDLIGMGKSDKPDLGYFFDDHVRFMDAFIEALGLEEVVLVIHDWGSALGFHWAKRNPERVKGIAFMEFIRPIPTWDEWPEFARETFQAFRTTDVGRKLIIDQNVFIEGTLPMGVVRPLTEVEMDHCREPFLNPVDREPLWRFPNELPIAGEPANIVALVEEYMDWLHQSPVPKLLFWGTPGVLIPPAEAARLAKSLPNCKAVDIGPGLNLLQEDNPDLIGSEIARWLSTLEISG

SEQ ID NO: 2190 - protein, 277 aa, Synthetic construct
MFHYVDVGPRDGTPVLFLHGNPTSSYVWRNIIPHVAPTHRCIAPDLIGMGKSDKPDLGYFFDDHVRFMDAFIEALGLEEVVLVIHDWGSALGFHWAKRNPERVKGIAFMEFIRPIPTWDEWPEFARETFQAFRTTDVGRKLIIDQNVFIEGTLPMGVVRPLTEVEMDHIREPFLNPVDREPLWRFPNELPIAGEPANIVALVEEYMDWLHQSPVPKLLFWGTPGVLIPPAEAARLAKSLPNCKAVDIGPGLNLLQEDNPDLIGSEIARWLSTLEISG

SEQ ID NO: 2191 - protein, 277 aa, Synthetic construct
MFHYVDVGPRDGTPVLFLHGNPTSSYVWRNIIPHVAPTHRCIAPDLIGMGKSDKPDLGYFFDDHVRFMDAFIEALGLEEVVLVIHDWGSALGFHWAKRNPERVKGIAFMEFIRPIPTWDEWPEFARETFQAFRTTDVGRKLIIDQNVFIEGTLPMGVVRPLTEVEMDHYKEPFLNPVDREPLWRFPNELPIAGEPANIVALVEEYMDWLHQSPVPKLLFWGTPGVLIPPAEAARLAKSLPNCKAVDIGPGLNLLQEDNPDLIGSEIARWLSTLEISG

SEQ ID NO: 2192 - protein, 277 aa, Synthetic construct
MFHYVDVGPRDGTPVLFLHGNPTSSYVWRNIIPHVAPTHRCIAPDLIGMGKSDKPDLGYFFDDHVRFMDAFIEALGLEEVVLVIHDWGSALGFHWAKRNPERVKGIAFMEFIRPIPTWDEWPEFARETFQAFRTTDVGRKLIIDQNVFIEGTLPMGVVRPLTEVEMDHYLEPFLNPVDREPLWRFPNELPIAGEPANIVALVEEYMDWLHQSPVPKLLFWGTPGVLIPPAEAARLAKSLPNCKAVDIGPGLNLLQEDNPDLIGSEIARWLSTLEISG

SEQ ID NO: 2193 - protein, 277 aa, Synthetic construct
MFHYVDVGPRDGTPVLFLHGNPTSSYVWRNIIPHVAPTHRCIAPDLIGMGKSDKPDLGYFFDDHVRFMDAFIEALGLEEVVLVIHDWGSALGFHWAKRNPERVKGIAFMEFIRPIPTWDEWPEFARETFQAFRTTDVGRKLIIDQNVFIEGTLPMGVVRPLTEVEMDHYHEPFLNPVDREPLWRFPNELPIAGEPANIVALVEEYMDWLHQSPVPKLLFWGTPGVLIPPAEAARLAKSLPNCKAVDIGPGLNLLQEDNPDLIGSEIARWLSTLEISG

SEQ ID NO: 2194 - protein, 277 aa, Synthetic construct
MFHYVDVGPRDGTPVLFLHGNPTSSYVWRNIIPHVAPTHRCIAPDLIGMGKSDKPDLGYFFDDHVRFMDAFIEALGLEEVVLVIHDWGSALGFHWAKRNPERVKGIAFMEFIRPIPTWDEWPEFARETFQAFRTTDVGRKLIIDQNVFIEGTLPMGVVRPLTEVEMDHYQEPFLNPVDREPLWRFPNELPIAGEPANIVALVEEYMDWLHQSPVPKLLFWGTPGVLIPPAEAARLAKSLPNCKAVDIGPGLNLLQEDNPDLIGSEIARWLSTLEISG

SEQ ID NO: 2195 - protein, 277 aa, Synthetic construct
MFHYVDVGPRDGTPVLFLHGNPTSSYVWRNIIPHVAPTHRCIAPDLIGMGKSDKPDLGYFFDDHVRFMDAFIEALGLEEVVLVIHDWGSALGFHWAKRNPERVKGIAFMEFIRPIPTWDEWPEFARETFQAFRTTDVGRKLIIDQNVFIEGTLPMGVVRPLTEVEMDHYAEPFLNPVDREPLWRFPNELPIAGEPANIVALVEEYMDWLHQSPVPKLLFWGTPGVLIPPAEAARLAKSLPNCKAVDIGPGLNLLQEDNPDLIGSEIARWLSTLEISG

SEQ ID NO: 2196 - protein, 277 aa, Synthetic construct
MFHYVDVGPRDGTPVLFLHGNPTSSYVWRNIIPHVAPTHRCIAPDLIGMGKSDKPDLGYFFDDHVRFMDAFIEALGLEEVVLVIHDWGSALGFHWAKRNPERVKGIAFMEFIRPIPTWDEWPEFARETFQAFRTTDVGRKLIIDQNVFIEGTLPMGVVRPLTEVEMDHYVEPFLNPVDREPLWRFPNELPIAGEPANIVALVEEYMDWLHQSPVPKLLFWGTPGVLIPPAEAARLAKSLPNCKAVDIGPGLNLLQEDNPDLIGSEIARWLSTLEISG

SEQ ID NO: 2197 - protein, 277 aa, Synthetic construct
MFHYVDVGPRDGTPVLFLHGNPTSSYVWRNIIPHVAPTHRCIAPDLIGMGKSDKPDLGYFFDDHVRFMDAFIEALGLEEVVLVIHDWGSALGFHWAKRNPERVKGIAFMEFIRPIPTWDEWPEFARETFQAFRTTDVGRKLIIDQNVFIEGTLPMGVVRPLTEVEMDHYRRPFLNPVDREPLWRFPNELPIAGEPANIVALVEEYMDWLHQSPVPKLLFWGTPGVLIPPAEAARLAKSLPNCKAVDIGPGLNLLQEDNPDLIGSEIARWLSTLEISG

SEQ ID NO: 2198 - protein, 277 aa, Synthetic construct
MFHYVDVGPRDGTPVLFLHGNPTSSYVWRNIIPHVAPTHRCIAPDLIGMGKSDKPDLGYFFDDHVRFMDAFIEALGLEEVVLVIHDWGSALGFHWAKRNPERVKGIAFMEFIRPIPTWDEWPEFARETFQAFRTTDVGRKLIIDQNVFIEGTLPMGVVRPLTEVEMDHYRKPFLNPVDREPLWRFPNELPIAGEPANIVALVEEYMDWLHQSPVPKLLFWGTPGVLIPPAEAARLAKSLPNCKAVDIGPGLNLLQEDNPDLIGSEIARWLSTLEISG

SEQ ID NO: 2199 - protein, 277 aa, Synthetic construct
MFHYVDVGPRDGTPVLFLHGNPTSSYVWRNIIPHVAPTHRCIAPDLIGMGKSDKPDLGYFFDDHVRFMDAFIEALGLEEVVLVIHDWGSALGFHWAKRNPERVKGIAFMEFIRPIPTWDEWPEFARETFQAFRTTDVGRKLIIDQNVFIEGTLPMGVVRPLTEVEMDHYRQPFLNPVDREPLWRFPNELPIAGEPANIVALVEEYMDWLHQSPVPKLLFWGTPGVLIPPAEAARLAKSLPNCKAVDIGPGLNLLQEDNPDLIGSEIARWLSTLEISG

SEQ ID NO: 2200 - protein, 277 aa, Synthetic construct
MFHYVDVGPRDGTPVLFLHGNPTSSYVWRNIIPHVAPTHRCIAPDLIGMGKSDKPDLGYFFDDHVRFMDAFIEALGLEEVVLVIHDWGSALGFHWAKRNPERVKGIAFMEFIRPIPTWDEWPEFARETFQAFRTTDVGRKLIIDQNVFIEGTLPMGVVRPLTEVEMDHYRSPFLNPVDREPLWRFPNELPIAGEPANIVALVEEYMDWLHQSPVPKLLFWGTPGVLIPPAEAARLAKSLPNCKAVDIGPGLNLLQEDNPDLIGSEIARWLSTLEISG

SEQ ID NO: 2201 - protein, 277 aa, Synthetic construct
MFHYVDVGPRDGTPVLFLHGNPTSSYVWRNIIPHVAPTHRCIAPDLIGMGKSDKPDLGYFFDDHVRFMDAFIEALGLEEVVLVIHDWGSALGFHWAKRNPERVKGIAFMEFIRPIPTWDEWPEFARETFQAFRTTDVGRKLIIDQNVFIEGTLPMGVVRPLTEVEMDHYRTPFLNPVDREPLWRFPNELPIAGEPANIVALVEEYMDWLHQSPVPKLLFWGTPGVLIPPAEAARLAKSLPNCKAVDIGPGLNLLQEDNPDLIGSEIARWLSTLEISG

SEQ ID NO: 2202 - protein, 277 aa, Synthetic construct
MFHYVDVGPRDGTPVLFLHGNPTSSYVWRNIIPHVAPTHRCIAPDLIGMGKSDKPDLGYFFDDHVRFMDAFIEALGLEEVVLVIHDWGSALGFHWAKRNPERVKGIAFMEFIRPIPTWDEWPEFARETFQAFRTTDVGRKLIIDQNVFIEGTLPMGVVRPLTEVEMDHYREVFLNPVDREPLWRFPNELPIAGEPANIVALVEEYMDWLHQSPVPKLLFWGTPGVLIPPAEAARLAKSLPNCKAVDIGPGLNLLQEDNPDLIGSEIARWLSTLEISG

SEQ ID NO: 2203 - protein, 277 aa, Synthetic construct
MFHYVDVGPRDGTPVLFLHGNPTSSYVWRNIIPHVAPTHRCIAPDLIGMGKSDKPDLGYFFDDHVRFMDAFIEALGLEEVVLVIHDWGSALGFHWAKRNPERVKGIAFMEFIRPIPTWDEWPEFARETFQAFRTTDVGRKLIIDQNVFIEGTLPMGVVRPLTEVEMDHYRESFLNPVDREPLWRFPNELPIAGEPANIVALVEEYMDWLHQSPVPKLLFWGTPGVLIPPAEAARLAKSLPNCKAVDIGPGLNLLQEDNPDLIGSEIARWLSTLEISG

SEQ ID NO: 2204 - protein, 277 aa, Synthetic construct
MFHYVDVGPRDGTPVLFLHGNPTSSYVWRNIIPHVAPTHRCIAPDLIGMGKSDKPDLGYFFDDHVRFMDAFIEALGLEEVVLVIHDWGSALGFHWAKRNPERVKGIAFMEFIRPIPTWDEWPEFARETFQAFRTTDVGRKLIIDQNVFIEGTLPMGVVRPLTEVEMDHYRETFLNPVDREPLWRFPNELPIAGEPANIVALVEEYMDWLHQSPVPKLLFWGTPGVLIPPAEAARLAKSLPNCKAVDIGPGLNLLQEDNPDLIGSEIARWLSTLEISG

SEQ ID NO: 2205 - protein, 277 aa, Synthetic construct
MFHYVDVGPRDGTPVLFLHGNPTSSYVWRNIIPHVAPTHRCIAPDLIGMGKSDKPDLGYFFDDHVRFMDAFIEALGLEEVVLVIHDWGSALGFHWAKRNPERVKGIAFMEFIRPIPTWDEWPEFARETFQAFRTTDVGRKLIIDQNVFIEGTLPMGVVRPLTEVEMDHYRELFLNPVDREPLWRFPNELPIAGEPANIVALVEEYMDWLHQSPVPKLLFWGTPGVLIPPAEAARLAKSLPNCKAVDIGPGLNLLQEDNPDLIGSEIARWLSTLEISG

SEQ ID NO: 2206 - protein, 277 aa, Synthetic construct
MFHYVDVGPRDGTPVLFLHGNPTSSYVWRNIIPHVAPTHRCIAPDLIGMGKSDKPDLGYFFDDHVRFMDAFIEALGLEEVVLVIHDWGSALGFHWAKRNPERVKGIAFMEFIRPIPTWDEWPEFARETFQAFRTTDVGRKLIIDQNVFIEGTLPMGVVRPLTEVEMDHYREHFLNPVDREPLWRFPNELPIAGEPANIVALVEEYMDWLHQSPVPKLLFWGTPGVLIPPAEAARLAKSLPNCKAVDIGPGLNLLQEDNPDLIGSEIARWLSTLEISG

SEQ ID NO: 2207 - protein, 277 aa, Synthetic construct
MFHYVDVGPRDGTPVLFLHGNPTSSYVWRNIIPHVAPTHRCIAPDLIGMGKSDKPDLGYFFDDHVRFMDAFIEALGLEEVVLVIHDWGSALGFHWAKRNPERVKGIAFMEFIRPIPTWDEWPEFARETFQAFRTTDVGRKLIIDQNVFIEGTLPMGVVRPLTEVEMDHYREPWLNPVDREPLWRFPNELPIAGEPANIVALVEEYMDWLHQSPVPKLLFWGTPGVLIPPAEAARLAKSLPNCKAVDIGPGLNLLQEDNPDLIGSEIARWLSTLEISG

SEQ ID NO: 2208 - protein, 277 aa, Synthetic construct
MFHYVDVGPRDGTPVLFLHGNPTSSYVWRNIIPHVAPTHRCIAPDLIGMGKSDKPDLGYFFDDHVRFMDAFIEALGLEEVVLVIHDWGSALGFHWAKRNPERVKGIAFMEFIRPIPTWDEWPEFARETFQAFRTTDVGRKLIIDQNVFIEGTLPMGVVRPLTEVEMDHYREPLLNPVDREPLWRFPNELPIAGEPANIVALVEEYMDWLHQSPVPKLLFWGTPGVLIPPAEAARLAKSLPNCKAVDIGPGLNLLQEDNPDLIGSEIARWLSTLEISG

SEQ ID NO: 2209 - protein, 277 aa, Synthetic construct
MFHYVDVGPRDGTPVLFLHGNPTSSYVWRNIIPHVAPTHRCIAPDLIGMGKSDKPDLGYFFDDHVRFMDAFIEALGLEEVVLVIHDWGSALGFHWAKRNPERVKGIAFMEFIRPIPTWDEWPEFARETFQAFRTTDVGRKLIIDQNVFIEGTLPMGVVRPLTEVEMDHYREPMLNPVDREPLWRFPNELPIAGEPANIVALVEEYMDWLHQSPVPKLLFWGTPGVLIPPAEAARLAKSLPNCKAVDIGPGLNLLQEDNPDLIGSEIARWLSTLEISG

SEQ ID NO: 2210 - protein, 277 aa, Synthetic construct
MFHYVDVGPRDGTPVLFLHGNPTSSYVWRNIIPHVAPTHRCIAPDLIGMGKSDKPDLGYFFDDHVRFMDAFIEALGLEEVVLVIHDWGSALGFHWAKRNPERVKGIAFMEFIRPIPTWDEWPEFARETFQAFRTTDVGRKLIIDQNVFIEGTLPMGVVRPLTEVEMDHYREPHLNPVDREPLWRFPNELPIAGEPANIVALVEEYMDWLHQSPVPKLLFWGTPGVLIPPAEAARLAKSLPNCKAVDIGPGLNLLQEDNPDLIGSEIARWLSTLEISG

SEQ ID NO: 2211 - protein, 277 aa, Synthetic construct
MFHYVDVGPRDGTPVLFLHGNPTSSYVWRNIIPHVAPTHRCIAPDLIGMGKSDKPDLGYFFDDHVRFMDAFIEALGLEEVVLVIHDWGSALGFHWAKRNPERVKGIAFMEFIRPIPTWDEWPEFARETFQAFRTTDVGRKLIIDQNVFIEGTLPMGVVRPLTEVEMDHYREPVLNPVDREPLWRFPNELPIAGEPANIVALVEEYMDWLHQSPVPKLLFWGTPGVLIPPAEAARLAKSLPNCKAVDIGPGLNLLQEDNPDLIGSEIARWLSTLEISG

SEQ ID NO: 2212 - protein, 277 aa, Synthetic construct
MFHYVDVGPRDGTPVLFLHGNPTSSYVWRNIIPHVAPTHRCIAPDLIGMGKSDKPDLGYFFDDHVRFMDAFIEALGLEEVVLVIHDWGSALGFHWAKRNPERVKGIAFMEFIRPIPTWDEWPEFARETFQAFRTTDVGRKLIIDQNVFIEGTLPMGVVRPLTEVEMDHYREPFRNPVDREPLWRFPNELPIAGEPANIVALVEEYMDWLHQSPVPKLLFWGTPGVLIPPAEAARLAKSLPNCKAVDIGPGLNLLQEDNPDLIGSEIARWLSTLEISG

SEQ ID NO: 2213 - protein, 277 aa, Synthetic construct
MFHYVDVGPRDGTPVLFLHGNPTSSYVWRNIIPHVAPTHRCIAPDLIGMGKSDKPDLGYFFDDHVRFMDAFIEALGLEEVVLVIHDWGSALGFHWAKRNPERVKGIAFMEFIRPIPTWDEWPEFARETFQAFRTTDVGRKLIIDQNVFIEGTLPMGVVRPLTEVEMDHYREPFPNPVDREPLWRFPNELPIAGEPANIVALVEEYMDWLHQSPVPKLLFWGTPGVLIPPAEAARLAKSLPNCKAVDIGPGLNLLQEDNPDLIGSEIARWLSTLEISG

SEQ ID NO: 2214 - protein, 277 aa, Synthetic construct
MFHYVDVGPRDGTPVLFLHGNPTSSYVWRNIIPHVAPTHRCIAPDLIGMGKSDKPDLGYFFDDHVRFMDAFIEALGLEEVVLVIHDWGSALGFHWAKRNPERVKGIAFMEFIRPIPTWDEWPEFARETFQAFRTTDVGRKLIIDQNVFIEGTLPMGVVRPLTEVEMDHYREPFANPVDREPLWRFPNELPIAGEPANIVALVEEYMDWLHQSPVPKLLFWGTPGVLIPPAEAARLAKSLPNCKAVDIGPGLNLLQEDNPDLIGSEIARWLSTLEISG

SEQ ID NO: 2215 - protein, 277 aa, Synthetic construct
MFHYVDVGPRDGTPVLFLHGNPTSSYVWRNIIPHVAPTHRCIAPDLIGMGKSDKPDLGYFFDDHVRFMDAFIEALGLEEVVLVIHDWGSALGFHWAKRNPERVKGIAFMEFIRPIPTWDEWPEFARETFQAFRTTDVGRKLIIDQNVFIEGTLPMGVVRPLTEVEMDHYREPFVNPVDREPLWRFPNELPIAGEPANIVALVEEYMDWLHQSPVPKLLFWGTPGVLIPPAEAARLAKSLPNCKAVDIGPGLNLLQEDNPDLIGSEIARWLSTLEISG

SEQ ID NO: 2216 - protein, 277 aa, Synthetic construct
MFHYVDVGPRDGTPVLFLHGNPTSSYVWRNIIPHVAPTHRCIAPDLIGMGKSDKPDLGYFFDDHVRFMDAFIEALGLEEVVLVIHDWGSALGFHWAKRNPERVKGIAFMEFIRPIPTWDEWPEFARETFQAFRTTDVGRKLIIDQNVFIEGTLPMGVVRPLTEVEMDHYREPFSNPVDREPLWRFPNELPIAGEPANIVALVEEYMDWLHQSPVPKLLFWGTPGVLIPPAEAARLAKSLPNCKAVDIGPGLNLLQEDNPDLIGSEIARWLSTLEISG

SEQ ID NO: 2217 - protein, 277 aa, Synthetic construct
MFHYVDVGPRDGTPVLFLHGNPTSSYVWRNIIPHVAPTHRCIAPDLIGMGKSDKPDLGYFFDDHVRFMDAFIEALGLEEVVLVIHDWGSALGFHWAKRNPERVKGIAFMEFIRPIPTWDEWPEFARETFQAFRTTDVGRKLIIDQNVFIEGTLPMGVVRPLTEVEMDHYREPFTNPVDREPLWRFPNELPIAGEPANIVALVEEYMDWLHQSPVPKLLFWGTPGVLIPPAEAARLAKSLPNCKAVDIGPGLNLLQEDNPDLIGSEIARWLSTLEISG

SEQ ID NO: 2218 - protein, 277 aa, Synthetic construct
MFHYVDVGPRDGTPVLFLHGNPTSSYVWRNIIPHVAPTHRCIAPDLIGMGKSDKPDLGYFFDDHVRFMDAFIEALGLEEVVLVIHDWGSALGFHWAKRNPERVKGIAFMEFIRPIPTWDEWPEFARETFQAFRTTDVGRKLIIDQNVFIEGTLPMGVVRPLTEVEMDHYREPFLTPVDREPLWRFPNELPIAGEPANIVALVEEYMDWLHQSPVPKLLFWGTPGVLIPPAEAARLAKSLPNCKAVDIGPGLNLLQEDNPDLIGSEIARWLSTLEISG

SEQ ID NO: 2219 - protein, 277 aa, Synthetic construct
MFHYVDVGPRDGTPVLFLHGNPTSSYVWRNIIPHVAPTHRCIAPDLIGMGKSDKPDLGYFFDDHVRFMDAFIEALGLEEVVLVIHDWGSALGFHWAKRNPERVKGIAFMEFIRPIPTWDEWPEFARETFQAFRTTDVGRKLIIDQNVFIEGTLPMGVVRPLTEVEMDHYREPFLSPVDREPLWRFPNELPIAGEPANIVALVEEYMDWLHQSPVPKLLFWGTPGVLIPPAEAARLAKSLPNCKAVDIGPGLNLLQEDNPDLIGSEIARWLSTLEISG

SEQ ID NO: 2220 - protein, 277 aa, Synthetic construct
MFHYVDVGPRDGTPVLFLHGNPTSSYVWRNIIPHVAPTHRCIAPDLIGMGKSDKPDLGYFFDDHVRFMDAFIEALGLEEVVLVIHDWGSALGFHWAKRNPERVKGIAFMEFIRPIPTWDEWPEFARETFQAFRTTDVGRKLIIDQNVFIEGTLPMGVVRPLTEVEMDHYREPFLDPVDREPLWRFPNELPIAGEPANIVALVEEYMDWLHQSPVPKLLFWGTPGVLIPPAEAARLAKSLPNCKAVDIGPGLNLLQEDNPDLIGSEIARWLSTLEISG

SEQ ID NO: 2221 - protein, 277 aa, Synthetic construct
MFHYVDVGPRDGTPVLFLHGNPTSSYVWRNIIPHVAPTHRCIAPDLIGMGKSDKPDLGYFFDDHVRFMDAFIEALGLEEVVLVIHDWGSALGFHWAKRNPERVKGIAFMEFIRPIPTWDEWPEFARETFQAFRTTDVGRKLIIDQNVFIEGTLPMGVVRPLTEVEMDHYREPFLKPVDREPLWRFPNELPIAGEPANIVALVEEYMDWLHQSPVPKLLFWGTPGVLIPPAEAARLAKSLPNCKAVDIGPGLNLLQEDNPDLIGSEIARWLSTLEISG

SEQ ID NO: 2222 - protein, 277 aa, Synthetic construct
MFHYVDVGPRDGTPVLFLHGNPTSSYVWRNIIPHVAPTHRCIAPDLIGMGKSDKPDLGYFFDDHVRFMDAFIEALGLEEVVLVIHDWGSALGFHWAKRNPERVKGIAFMEFIRPIPTWDEWPEFARETFQAFRTTDVGRKLIIDQNVFIEGTLPMGVVRPLTEVEMDHYREPFLRPVDREPLWRFPNELPIAGEPANIVALVEEYMDWLHQSPVPKLLFWGTPGVLIPPAEAARLAKSLPNCKAVDIGPGLNLLQEDNPDLIGSEIARWLSTLEISG

SEQ ID NO: 2223 - protein, 277 aa, Synthetic construct
MFHYVDVGPRDGTPVLFLHGNPTSSYVWRNIIPHVAPTHRCIAPDLIGMGKSDKPDLGYFFDDHVRFMDAFIEALGLEEVVLVIHDWGSALGFHWAKRNPERVKGIAFMEFIRPIPTWDEWPEFARETFQAFRTTDVGRKLIIDQNVFIEGTLPMGVVRPLTEVEMDHYREPFLAPVDREPLWRFPNELPIAGEPANIVALVEEYMDWLHQSPVPKLLFWGTPGVLIPPAEAARLAKSLPNCKAVDIGPGLNLLQEDNPDLIGSEIARWLSTLEISG

SEQ ID NO: 2224 - protein, 277 aa, Synthetic construct
MFHYVDVGPRDGTPVLFLHGNPTSSYVWRNIIPHVAPTHRCIAPDLIGMGKSDKPDLGYFFDDHVRFMDAFIEALGLEEVVLVIHDWGSALGFHWAKRNPERVKGIAFMEFIRPIPTWDEWPEFARETFQAFRTTDVGRKLIIDQNVFIEGTLPMGVVRPLTEVEMDHYREPFLNAVDREPLWRFPNELPIAGEPANIVALVEEYMDWLHQSPVPKLLFWGTPGVLIPPAEAARLAKSLPNCKAVDIGPGLNLLQEDNPDLIGSEIARWLSTLEISG

SEQ ID NO: 2225 - protein, 277 aa, Synthetic construct
MFHYVDVGPRDGTPVLFLHGNPTSSYVWRNIIPHVAPTHRCIAPDLIGMGKSDKPDLGYFFDDHVRFMDAFIEALGLEEVVLVIHDWGSALGFHWAKRNPERVKGIAFMEFIRPIPTWDEWPEFARETFQAFRTTDVGRKLIIDQNVFIEGTLPMGVVRPLTEVEMDHYREPFLNEVDREPLWRFPNELPIAGEPANIVALVEEYMDWLHQSPVPKLLFWGTPGVLIPPAEAARLAKSLPNCKAVDIGPGLNLLQEDNPDLIGSEIARWLSTLEISG

SEQ ID NO: 2226 - protein, 277 aa, Synthetic construct
MFHYVDVGPRDGTPVLFLHGNPTSSYVWRNIIPHVAPTHRCIAPDLIGMGKSDKPDLGYFFDDHVRFMDAFIEALGLEEVVLVIHDWGSALGFHWAKRNPERVKGIAFMEFIRPIPTWDEWPEFARETFQAFRTTDVGRKLIIDQNVFIEGTLPMGVVRPLTEVEMDHYREPFLNRVDREPLWRFPNELPIAGEPANIVALVEEYMDWLHQSPVPKLLFWGTPGVLIPPAEAARLAKSLPNCKAVDIGPGLNLLQEDNPDLIGSEIARWLSTLEISG

SEQ ID NO: 2227 - protein, 277 aa, Synthetic construct
MFHYVDVGPRDGTPVLFLHGNPTSSYVWRNIIPHVAPTHRCIAPDLIGMGKSDKPDLGYFFDDHVRFMDAFIEALGLEEVVLVIHDWGSALGFHWAKRNPERVKGIAFMEFIRPIPTWDEWPEFARETFQAFRTTDVGRKLIIDQNVFIEGTLPMGVVRPLTEVEMDHYREPFLNKVDREPLWRFPNELPIAGEPANIVALVEEYMDWLHQSPVPKLLFWGTPGVLIPPAEAARLAKSLPNCKAVDIGPGLNLLQEDNPDLIGSEIARWLSTLEISG

SEQ ID NO: 2228 - protein, 277 aa, Synthetic construct
MFHYVDVGPRDGTPVLFLHGNPTSSYVWRNIIPHVAPTHRCIAPDLIGMGKSDKPDLGYFFDDHVRFMDAFIEALGLEEVVLVIHDWGSALGFHWAKRNPERVKGIAFMEFIRPIPTWDEWPEFARETFQAFRTTDVGRKLIIDQNVFIEGTLPMGVVRPLTEVEMDHYREPFLNSVDREPLWRFPNELPIAGEPANIVALVEEYMDWLHQSPVPKLLFWGTPGVLIPPAEAARLAKSLPNCKAVDIGPGLNLLQEDNPDLIGSEIARWLSTLEISG

SEQ ID NO: 2229 - protein, 277 aa, Synthetic construct
MFHYVDVGPRDGTPVLFLHGNPTSSYVWRNIIPHVAPTHRCIAPDLIGMGKSDKPDLGYFFDDHVRFMDAFIEALGLEEVVLVIHDWGSALGFHWAKRNPERVKGIAFMEFIRPIPTWDEWPEFARETFQAFRTTDVGRKLIIDQNVFIEGTLPMGVVRPLTEVEMDHYREPFLNDVDREPLWRFPNELPIAGEPANIVALVEEYMDWLHQSPVPKLLFWGTPGVLIPPAEAARLAKSLPNCKAVDIGPGLNLLQEDNPDLIGSEIARWLSTLEISG

SEQ ID NO: 2230 - protein, 277 aa, Synthetic construct
MFHYVDVGPRDGTPVLFLHGNPTSSYVWRNIIPHVAPTHRCIAPDLIGMGKSDKPDLGYFFDDHVRFMDAFIEALGLEEVVLVIHDWGSALGFHWAKRNPERVKGIAFMEFIRPIPTWDEWPEFARETFQAFRTTDVGRKLIIDQNVFIEGTLPMGVVRPLTEVEMDHYREPFLNPADREPLWRFPNELPIAGEPANIVALVEEYMDWLHQSPVPKLLFWGTPGVLIPPAEAARLAKSLPNCKAVDIGPGLNLLQEDNPDLIGSEIARWLSTLEISG

SEQ ID NO: 2231 - protein, 277 aa, Synthetic construct
MFHYVDVGPRDGTPVLFLHGNPTSSYVWRNIIPHVAPTHRCIAPDLIGMGKSDKPDLGYFFDDHVRFMDAFIEALGLEEVVLVIHDWGSALGFHWAKRNPERVKGIAFMEFIRPIPTWDEWPEFARETFQAFRTTDVGRKLIIDQNVFIEGTLPMGVVRPLTEVEMDHYREPFLNPEDREPLWRFPNELPIAGEPANIVALVEEYMDWLHQSPVPKLLFWGTPGVLIPPAEAARLAKSLPNCKAVDIGPGLNLLQEDNPDLIGSEIARWLSTLEISG

SEQ ID NO: 2232 - protein, 277 aa, Synthetic construct
MFHYVDVGPRDGTPVLFLHGNPTSSYVWRNIIPHVAPTHRCIAPDLIGMGKSDKPDLGYFFDDHVRFMDAFIEALGLEEVVLVIHDWGSALGFHWAKRNPERVKGIAFMEFIRPIPTWDEWPEFARETFQAFRTTDVGRKLIIDQNVFIEGTLPMGVVRPLTEVEMDHYREPFLNPDDREPLWRFPNELPIAGEPANIVALVEEYMDWLHQSPVPKLLFWGTPGVLIPPAEAARLAKSLPNCKAVDIGPGLNLLQEDNPDLIGSEIARWLSTLEISG

SEQ ID NO: 2233 - protein, 277 aa, Synthetic construct
MFHYVDVGPRDGTPVLFLHGNPTSSYVWRNIIPHVAPTHRCIAPDLIGMGKSDKPDLGYFFDDHVRFMDAFIEALGLEEVVLVIHDWGSALGFHWAKRNPERVKGIAFMEFIRPIPTWDEWPEFARETFQAFRTTDVGRKLIIDQNVFIEGTLPMGVVRPLTEVEMDHYREPFLNPKDREPLWRFPNELPIAGEPANIVALVEEYMDWLHQSPVPKLLFWGTPGVLIPPAEAARLAKSLPNCKAVDIGPGLNLLQEDNPDLIGSEIARWLSTLEISG

SEQ ID NO: 2234 - protein, 277 aa, Synthetic construct
MFHYVDVGPRDGTPVLFLHGNPTSSYVWRNIIPHVAPTHRCIAPDLIGMGKSDKPDLGYFFDDHVRFMDAFIEALGLEEVVLVIHDWGSALGFHWAKRNPERVKGIAFMEFIRPIPTWDEWPEFARETFQAFRTTDVGRKLIIDQNVFIEGTLPMGVVRPLTEVEMDHYREPFLNPQDREPLWRFPNELPIAGEPANIVALVEEYMDWLHQSPVPKLLFWGTPGVLIPPAEAARLAKSLPNCKAVDIGPGLNLLQEDNPDLIGSEIARWLSTLEISG

SEQ ID NO: 2235 - protein, 277 aa, Synthetic construct
MFHYVDVGPRDGTPVLFLHGNPTSSYVWRNIIPHVAPTHRCIAPDLIGMGKSDKPDLGYFFDDHVRFMDAFIEALGLEEVVLVIHDWGSALGFHWAKRNPERVKGIAFMEFIRPIPTWDEWPEFARETFQAFRTTDVGRKLIIDQNVFIEGTLPMGVVRPLTEVEMDHYREPFLNPGDREPLWRFPNELPIAGEPANIVALVEEYMDWLHQSPVPKLLFWGTPGVLIPPAEAARLAKSLPNCKAVDIGPGLNLLQEDNPDLIGSEIARWLSTLEISG

SEQ ID NO: 2236 - protein, 277 aa, Synthetic construct
MFHYVDVGPRDGTPVLFLHGNPTSSYVWRNIIPHVAPTHRCIAPDLIGMGKSDKPDLGYFFDDHVRFMDAFIEALGLEEVVLVIHDWGSALGFHWAKRNPERVKGIAFMEFIRPIPTWDEWPEFARETFQAFRTTDVGRKLIIDQNVFIEGTLPMGVVRPLTEVEMDHYREPFLNPVSREPLWRFPNELPIAGEPANIVALVEEYMDWLHQSPVPKLLFWGTPGVLIPPAEAARLAKSLPNCKAVDIGPGLNLLQEDNPDLIGSEIARWLSTLEISG

SEQ ID NO: 2237 - protein, 277 aa, Synthetic construct
MFHYVDVGPRDGTPVLFLHGNPTSSYVWRNIIPHVAPTHRCIAPDLIGMGKSDKPDLGYFFDDHVRFMDAFIEALGLEEVVLVIHDWGSALGFHWAKRNPERVKGIAFMEFIRPIPTWDEWPEFARETFQAFRTTDVGRKLIIDQNVFIEGTLPMGVVRPLTEVEMDHYREPFLNPVAREPLWRFPNELPIAGEPANIVALVEEYMDWLHQSPVPKLLFWGTPGVLIPPAEAARLAKSLPNCKAVDIGPGLNLLQEDNPDLIGSEIARWLSTLEISG

SEQ ID NO: 2238 - protein, 277 aa, Synthetic construct
MFHYVDVGPRDGTPVLFLHGNPTSSYVWRNIIPHVAPTHRCIAPDLIGMGKSDKPDLGYFFDDHVRFMDAFIEALGLEEVVLVIHDWGSALGFHWAKRNPERVKGIAFMEFIRPIPTWDEWPEFARETFQAFRTTDVGRKLIIDQNVFIEGTLPMGVVRPLTEVEMDHYREPFLNPVTREPLWRFPNELPIAGEPANIVALVEEYMDWLHQSPVPKLLFWGTPGVLIPPAEAARLAKSLPNCKAVDIGPGLNLLQEDNPDLIGSEIARWLSTLEISG

SEQ ID NO: 2239 - protein, 277 aa, Synthetic construct
MFHYVDVGPRDGTPVLFLHGNPTSSYVWRNIIPHVAPTHRCIAPDLIGMGKSDKPDLGYFFDDHVRFMDAFIEALGLEEVVLVIHDWGSALGFHWAKRNPERVKGIAFMEFIRPIPTWDEWPEFARETFQAFRTTDVGRKLIIDQNVFIEGTLPMGVVRPLTEVEMDHYREPFLNPVNREPLWRFPNELPIAGEPANIVALVEEYMDWLHQSPVPKLLFWGTPGVLIPPAEAARLAKSLPNCKAVDIGPGLNLLQEDNPDLIGSEIARWLSTLEISG

SEQ ID NO: 2240 - protein, 277 aa, Synthetic construct
MFHYVDVGPRDGTPVLFLHGNPTSSYVWRNIIPHVAPTHRCIAPDLIGMGKSDKPDLGYFFDDHVRFMDAFIEALGLEEVVLVIHDWGSALGFHWAKRNPERVKGIAFMEFIRPIPTWDEWPEFARETFQAFRTTDVGRKLIIDQNVFIEGTLPMGVVRPLTEVEMDHYREPFLNPVEREPLWRFPNELPIAGEPANIVALVEEYMDWLHQSPVPKLLFWGTPGVLIPPAEAARLAKSLPNCKAVDIGPGLNLLQEDNPDLIGSEIARWLSTLEISG

SEQ ID NO: 2241 - protein, 277 aa, Synthetic construct
MFHYVDVGPRDGTPVLFLHGNPTSSYVWRNIIPHVAPTHRCIAPDLIGMGKSDKPDLGYFFDDHVRFMDAFIEALGLEEVVLVIHDWGSALGFHWAKRNPERVKGIAFMEFIRPIPTWDEWPEFARETFQAFRTTDVGRKLIIDQNVFIEGTLPMGVVRPLTEVEMDHYREPFLNPVGREPLWRFPNELPIAGEPANIVALVEEYMDWLHQSPVPKLLFWGTPGVLIPPAEAARLAKSLPNCKAVDIGPGLNLLQEDNPDLIGSEIARWLSTLEISG

SEQ ID NO: 2242 - protein, 277 aa, Synthetic construct
MFHYVDVGPRDGTPVLFLHGNPTSSYVWRNIIPHVAPTHRCIAPDLIGMGKSDKPDLGYFFDDHVRFMDAFIEALGLEEVVLVIHDWGSALGFHWAKRNPERVKGIAFMEFIRPIPTWDEWPEFARETFQAFRTTDVGRKLIIDQNVFIEGTLPMGVVRPLTEVEMDHYREPFLNPVDKEPLWRFPNELPIAGEPANIVALVEEYMDWLHQSPVPKLLFWGTPGVLIPPAEAARLAKSLPNCKAVDIGPGLNLLQEDNPDLIGSEIARWLSTLEISG

SEQ ID NO: 2243 - protein, 277 aa, Synthetic construct
MFHYVDVGPRDGTPVLFLHGNPTSSYVWRNIIPHVAPTHRCIAPDLIGMGKSDKPDLGYFFDDHVRFMDAFIEALGLEEVVLVIHDWGSALGFHWAKRNPERVKGIAFMEFIRPIPTWDEWPEFARETFQAFRTTDVGRKLIIDQNVFIEGTLPMGVVRPLTEVEMDHYREPFLNPVDQEPLWRFPNELPIAGEPANIVALVEEYMDWLHQSPVPKLLFWGTPGVLIPPAEAARLAKSLPNCKAVDIGPGLNLLQEDNPDLIGSEIARWLSTLEISG

SEQ ID NO: 2244 - protein, 277 aa, Synthetic construct
MFHYVDVGPRDGTPVLFLHGNPTSSYVWRNIIPHVAPTHRCIAPDLIGMGKSDKPDLGYFFDDHVRFMDAFIEALGLEEVVLVIHDWGSALGFHWAKRNPERVKGIAFMEFIRPIPTWDEWPEFARETFQAFRTTDVGRKLIIDQNVFIEGTLPMGVVRPLTEVEMDHYREPFLNPVDHEPLWRFPNELPIAGEPANIVALVEEYMDWLHQSPVPKLLFWGTPGVLIPPAEAARLAKSLPNCKAVDIGPGLNLLQEDNPDLIGSEIARWLSTLEISG

SEQ ID NO: 2245 - protein, 277 aa, Synthetic construct
MFHYVDVGPRDGTPVLFLHGNPTSSYVWRNIIPHVAPTHRCIAPDLIGMGKSDKPDLGYFFDDHVRFMDAFIEALGLEEVVLVIHDWGSALGFHWAKRNPERVKGIAFMEFIRPIPTWDEWPEFARETFQAFRTTDVGRKLIIDQNVFIEGTLPMGVVRPLTEVEMDHYREPFLNPVDLEPLWRFPNELPIAGEPANIVALVEEYMDWLHQSPVPKLLFWGTPGVLIPPAEAARLAKSLPNCKAVDIGPGLNLLQEDNPDLIGSEIARWLSTLEISG

SEQ ID NO: 2246 - protein, 277 aa, Synthetic construct
MFHYVDVGPRDGTPVLFLHGNPTSSYVWRNIIPHVAPTHRCIAPDLIGMGKSDKPDLGYFFDDHVRFMDAFIEALGLEEVVLVIHDWGSALGFHWAKRNPERVKGIAFMEFIRPIPTWDEWPEFARETFQAFRTTDVGRKLIIDQNVFIEGTLPMGVVRPLTEVEMDHYREPFLNPVDAEPLWRFPNELPIAGEPANIVALVEEYMDWLHQSPVPKLLFWGTPGVLIPPAEAARLAKSLPNCKAVDIGPGLNLLQEDNPDLIGSEIARWLSTLEISG

SEQ ID NO: 2247 - protein, 277 aa, Synthetic construct
MFHYVDVGPRDGTPVLFLHGNPTSSYVWRNIIPHVAPTHRCIAPDLIGMGKSDKPDLGYFFDDHVRFMDAFIEALGLEEVVLVIHDWGSALGFHWAKRNPERVKGIAFMEFIRPIPTWDEWPEFARETFQAFRTTDVGRKLIIDQNVFIEGTLPMGVVRPLTEVEMDHYREPFLNPVDCEPLWRFPNELPIAGEPANIVALVEEYMDWLHQSPVPKLLFWGTPGVLIPPAEAARLAKSLPNCKAVDIGPGLNLLQEDNPDLIGSEIARWLSTLEISG

SEQ ID NO: 2248 - protein, 277 aa, Synthetic construct
MFHYVDVGPRDGTPVLFLHGNPTSSYVWRNIIPHVAPTHRCIAPDLIGMGKSDKPDLGYFFDDHVRFMDAFIEALGLEEVVLVIHDWGSALGFHWAKRNPERVKGIAFMEFIRPIPTWDEWPEFARETFQAFRTTDVGRKLIIDQNVFIEGTLPMGVVRPLTEVEMDHYREPFLNPVDRAPLWRFPNELPIAGEPANIVALVEEYMDWLHQSPVPKLLFWGTPGVLIPPAEAARLAKSLPNCKAVDIGPGLNLLQEDNPDLIGSEIARWLSTLEISG

SEQ ID NO: 2249 - protein, 277 aa, Synthetic construct
MFHYVDVGPRDGTPVLFLHGNPTSSYVWRNIIPHVAPTHRCIAPDLIGMGKSDKPDLGYFFDDHVRFMDAFIEALGLEEVVLVIHDWGSALGFHWAKRNPERVKGIAFMEFIRPIPTWDEWPEFARETFQAFRTTDVGRKLIIDQNVFIEGTLPMGVVRPLTEVEMDHYREPFLNPVDRLPLWRFPNELPIAGEPANIVALVEEYMDWLHQSPVPKLLFWGTPGVLIPPAEAARLAKSLPNCKAVDIGPGLNLLQEDNPDLIGSEIARWLSTLEISG

SEQ ID NO: 2250 - protein, 277 aa, Synthetic construct
MFHYVDVGPRDGTPVLFLHGNPTSSYVWRNIIPHVAPTHRCIAPDLIGMGKSDKPDLGYFFDDHVRFMDAFIEALGLEEVVLVIHDWGSALGFHWAKRNPERVKGIAFMEFIRPIPTWDEWPEFARETFQAFRTTDVGRKLIIDQNVFIEGTLPMGVVRPLTEVEMDHYREPFLNPVDRKPLWRFPNELPIAGEPANIVALVEEYMDWLHQSPVPKLLFWGTPGVLIPPAEAARLAKSLPNCKAVDIGPGLNLLQEDNPDLIGSEIARWLSTLEISG

SEQ ID NO: 2251 - protein, 277 aa, Synthetic construct
MFHYVDVGPRDGTPVLFLHGNPTSSYVWRNIIPHVAPTHRCIAPDLIGMGKSDKPDLGYFFDDHVRFMDAFIEALGLEEVVLVIHDWGSALGFHWAKRNPERVKGIAFMEFIRPIPTWDEWPEFARETFQAFRTTDVGRKLIIDQNVFIEGTLPMGVVRPLTEVEMDHYREPFLNPVDRQPLWRFPNELPIAGEPANIVALVEEYMDWLHQSPVPKLLFWGTPGVLIPPAEAARLAKSLPNCKAVDIGPGLNLLQEDNPDLIGSEIARWLSTLEISG

SEQ ID NO: 2252 - protein, 277 aa, Synthetic construct
MFHYVDVGPRDGTPVLFLHGNPTSSYVWRNIIPHVAPTHRCIAPDLIGMGKSDKPDLGYFFDDHVRFMDAFIEALGLEEVVLVIHDWGSALGFHWAKRNPERVKGIAFMEFIRPIPTWDEWPEFARETFQAFRTTDVGRKLIIDQNVFIEGTLPMGVVRPLTEVEMDHYREPFLNPVDRVPLWRFPNELPIAGEPANIVALVEEYMDWLHQSPVPKLLFWGTPGVLIPPAEAARLAKSLPNCKAVDIGPGLNLLQEDNPDLIGSEIARWLSTLEISG

SEQ ID NO: 2253 - protein, 277 aa, Synthetic construct
MFHYVDVGPRDGTPVLFLHGNPTSSYVWRNIIPHVAPTHRCIAPDLIGMGKSDKPDLGYFFDDHVRFMDAFIEALGLEEVVLVIHDWGSALGFHWAKRNPERVKGIAFMEFIRPIPTWDEWPEFARETFQAFRTTDVGRKLIIDQNVFIEGTLPMGVVRPLTEVEMDHYREPFLNPVDRRPLWRFPNELPIAGEPANIVALVEEYMDWLHQSPVPKLLFWGTPGVLIPPAEAARLAKSLPNCKAVDIGPGLNLLQEDNPDLIGSEIARWLSTLEISG

SEQ ID NO: 2254 - protein, 277 aa, Synthetic construct
MFHYVDVGPRDGTPVLFLHGNPTSSYVWRNIIPHVAPTHRCIAPDLIGMGKSDKPDLGYFFDDHVRFMDAFIEALGLEEVVLVIHDWGSALGFHWAKRNPERVKGIAFMEFIRPIPTWDEWPEFARETFQAFRTTDVGRKLIIDQNVFIEGTLPMGVVRPLTEVEMDHYREPFLNPVDREALWRFPNELPIAGEPANIVALVEEYMDWLHQSPVPKLLFWGTPGVLIPPAEAARLAKSLPNCKAVDIGPGLNLLQEDNPDLIGSEIARWLSTLEISG

SEQ ID NO: 2255 - protein, 277 aa, Synthetic construct
MFHYVDVGPRDGTPVLFLHGNPTSSYVWRNIIPHVAPTHRCIAPDLIGMGKSDKPDLGYFFDDHVRFMDAFIEALGLEEVVLVIHDWGSALGFHWAKRNPERVKGIAFMEFIRPIPTWDEWPEFARETFQAFRTTDVGRKLIIDQNVFIEGTLPMGVVRPLTEVEMDHYREPFLNPVDRESLWRFPNELPIAGEPANIVALVEEYMDWLHQSPVPKLLFWGTPGVLIPPAEAARLAKSLPNCKAVDIGPGLNLLQEDNPDLIGSEIARWLSTLEISG

SEQ ID NO: 2256 - protein, 277 aa, Synthetic construct
MFHYVDVGPRDGTPVLFLHGNPTSSYVWRNIIPHVAPTHRCIAPDLIGMGKSDKPDLGYFFDDHVRFMDAFIEALGLEEVVLVIHDWGSALGFHWAKRNPERVKGIAFMEFIRPIPTWDEWPEFARETFQAFRTTDVGRKLIIDQNVFIEGTLPMGVVRPLTEVEMDHYREPFLNPVDREGLWRFPNELPIAGEPANIVALVEEYMDWLHQSPVPKLLFWGTPGVLIPPAEAARLAKSLPNCKAVDIGPGLNLLQEDNPDLIGSEIARWLSTLEISG

SEQ ID NO: 2257 - protein, 277 aa, Synthetic construct
MFHYVDVGPRDGTPVLFLHGNPTSSYVWRNIIPHVAPTHRCIAPDLIGMGKSDKPDLGYFFDDHVRFMDAFIEALGLEEVVLVIHDWGSALGFHWAKRNPERVKGIAFMEFIRPIPTWDEWPEFARETFQAFRTTDVGRKLIIDQNVFIEGTLPMGVVRPLTEVEMDHYREPFLNPVDRETLWRFPNELPIAGEPANIVALVEEYMDWLHQSPVPKLLFWGTPGVLIPPAEAARLAKSLPNCKAVDIGPGLNLLQEDNPDLIGSEIARWLSTLEISG

SEQ ID NO: 2258 - protein, 277 aa, Synthetic construct
MFHYVDVGPRDGTPVLFLHGNPTSSYVWRNIIPHVAPTHRCIAPDLIGMGKSDKPDLGYFFDDHVRFMDAFIEALGLEEVVLVIHDWGSALGFHWAKRNPERVKGIAFMEFIRPIPTWDEWPEFARETFQAFRTTDVGRKLIIDQNVFIEGTLPMGVVRPLTEVEMDHYREPFLNPVDREVLWRFPNELPIAGEPANIVALVEEYMDWLHQSPVPKLLFWGTPGVLIPPAEAARLAKSLPNCKAVDIGPGLNLLQEDNPDLIGSEIARWLSTLEISG

SEQ ID NO: 2259 - protein, 277 aa, Synthetic construct
MFHYVDVGPRDGTPVLFLHGNPTSSYVWRNIIPHVAPTHRCIAPDLIGMGKSDKPDLGYFFDDHVRFMDAFIEALGLEEVVLVIHDWGSALGFHWAKRNPERVKGIAFMEFIRPIPTWDEWPEFARETFQAFRTTDVGRKLIIDQNVFIEGTLPMGVVRPLTEVEMDHYREPFLNPVDRELLWRFPNELPIAGEPANIVALVEEYMDWLHQSPVPKLLFWGTPGVLIPPAEAARLAKSLPNCKAVDIGPGLNLLQEDNPDLIGSEIARWLSTLEISG

SEQ ID NO: 2260 - protein, 277 aa, Synthetic construct
MFHYVDVGPRDGTPVLFLHGNPTSSYVWRNIIPHVAPTHRCIAPDLIGMGKSDKPDLGYFFDDHVRFMDAFIEALGLEEVVLVIHDWGSALGFHWAKRNPERVKGIAFMEFIRPIPTWDEWPEFARETFQAFRTTDVGRKLIIDQNVFIEGTLPMGVVRPLTEVEMDHYREPFLNPVDREPTWRFPNELPIAGEPANIVALVEEYMDWLHQSPVPKLLFWGTPGVLIPPAEAARLAKSLPNCKAVDIGPGLNLLQEDNPDLIGSEIARWLSTLEISG

SEQ ID NO: 2261 - protein, 277 aa, Synthetic construct
MFHYVDVGPRDGTPVLFLHGNPTSSYVWRNIIPHVAPTHRCIAPDLIGMGKSDKPDLGYFFDDHVRFMDAFIEALGLEEVVLVIHDWGSALGFHWAKRNPERVKGIAFMEFIRPIPTWDEWPEFARETFQAFRTTDVGRKLIIDQNVFIEGTLPMGVVRPLTEVEMDHYREPFLNPVDREPIWRFPNELPIAGEPANIVALVEEYMDWLHQSPVPKLLFWGTPGVLIPPAEAARLAKSLPNCKAVDIGPGLNLLQEDNPDLIGSEIARWLSTLEISG

SEQ ID NO: 2262 - protein, 277 aa, Synthetic construct
MFHYVDVGPRDGTPVLFLHGNPTSSYVWRNIIPHVAPTHRCIAPDLIGMGKSDKPDLGYFFDDHVRFMDAFIEALGLEEVVLVIHDWGSALGFHWAKRNPERVKGIAFMEFIRPIPTWDEWPEFARETFQAFRTTDVGRKLIIDQNVFIEGTLPMGVVRPLTEVEMDHYREPFLNPVDREPVWRFPNELPIAGEPANIVALVEEYMDWLHQSPVPKLLFWGTPGVLIPPAEAARLAKSLPNCKAVDIGPGLNLLQEDNPDLIGSEIARWLSTLEISG

SEQ ID NO: 2263 - protein, 277 aa, Synthetic construct
MFHYVDVGPRDGTPVLFLHGNPTSSYVWRNIIPHVAPTHRCIAPDLIGMGKSDKPDLGYFFDDHVRFMDAFIEALGLEEVVLVIHDWGSALGFHWAKRNPERVKGIAFMEFIRPIPTWDEWPEFARETFQAFRTTDVGRKLIIDQNVFIEGTLPMGVVRPLTEVEMDHYREPFLNPVDREPMWRFPNELPIAGEPANIVALVEEYMDWLHQSPVPKLLFWGTPGVLIPPAEAARLAKSLPNCKAVDIGPGLNLLQEDNPDLIGSEIARWLSTLEISG

SEQ ID NO: 2264 - protein, 277 aa, Synthetic construct
MFHYVDVGPRDGTPVLFLHGNPTSSYVWRNIIPHVAPTHRCIAPDLIGMGKSDKPDLGYFFDDHVRFMDAFIEALGLEEVVLVIHDWGSALGFHWAKRNPERVKGIAFMEFIRPIPTWDEWPEFARETFQAFRTTDVGRKLIIDQNVFIEGTLPMGVVRPLTEVEMDHYREPFLNPVDREPAWRFPNELPIAGEPANIVALVEEYMDWLHQSPVPKLLFWGTPGVLIPPAEAARLAKSLPNCKAVDIGPGLNLLQEDNPDLIGSEIARWLSTLEISG

SEQ ID NO: 2265 - protein, 277 aa, Synthetic construct
MFHYVDVGPRDGTPVLFLHGNPTSSYVWRNIIPHVAPTHRCIAPDLIGMGKSDKPDLGYFFDDHVRFMDAFIEALGLEEVVLVIHDWGSALGFHWAKRNPERVKGIAFMEFIRPIPTWDEWPEFARETFQAFRTTDVGRKLIIDQNVFIEGTLPMGVVRPLTEVEMDHYREPFLNPVDREPSWRFPNELPIAGEPANIVALVEEYMDWLHQSPVPKLLFWGTPGVLIPPAEAARLAKSLPNCKAVDIGPGLNLLQEDNPDLIGSEIARWLSTLEISG

SEQ ID NO: 2266 - protein, 277 aa, Synthetic construct
MFHYVDVGPRDGTPVLFLHGNPTSSYVWRNIIPHVAPTHRCIAPDLIGMGKSDKPDLGYFFDDHVRFMDAFIEALGLEEVVLVIHDWGSALGFHWAKRNPERVKGIAFMEFIRPIPTWDEWPEFARETFQAFRTTDVGRKLIIDQNVFIEGTLPMGVVRPLTEVEMDHYREPFLNPVDREPLLRFPNELPIAGEPANIVALVEEYMDWLHQSPVPKLLFWGTPGVLIPPAEAARLAKSLPNCKAVDIGPGLNLLQEDNPDLIGSEIARWLSTLEISG

SEQ ID NO: 2267 - protein, 277 aa, Synthetic construct
MFHYVDVGPRDGTPVLFLHGNPTSSYVWRNIIPHVAPTHRCIAPDLIGMGKSDKPDLGYFFDDHVRFMDAFIEALGLEEVVLVIHDWGSALGFHWAKRNPERVKGIAFMEFIRPIPTWDEWPEFARETFQAFRTTDVGRKLIIDQNVFIEGTLPMGVVRPLTEVEMDHYREPFLNPVDREPLRRFPNELPIAGEPANIVALVEEYMDWLHQSPVPKLLFWGTPGVLIPPAEAARLAKSLPNCKAVDIGPGLNLLQEDNPDLIGSEIARWLSTLEISG

SEQ ID NO: 2268 - protein, 277 aa, Synthetic construct
MFHYVDVGPRDGTPVLFLHGNPTSSYVWRNIIPHVAPTHRCIAPDLIGMGKSDKPDLGYFFDDHVRFMDAFIEALGLEEVVLVIHDWGSALGFHWAKRNPERVKGIAFMEFIRPIPTWDEWPEFARETFQAFRTTDVGRKLIIDQNVFIEGTLPMGVVRPLTEVEMDHYREPFLNPVDREPLYRFPNELPIAGEPANIVALVEEYMDWLHQSPVPKLLFWGTPGVLIPPAEAARLAKSLPNCKAVDIGPGLNLLQEDNPDLIGSEIARWLSTLEISG

SEQ ID NO: 2269 - protein, 277 aa, Synthetic construct
MFHYVDVGPRDGTPVLFLHGNPTSSYVWRNIIPHVAPTHRCIAPDLIGMGKSDKPDLGYFFDDHVRFMDAFIEALGLEEVVLVIHDWGSALGFHWAKRNPERVKGIAFMEFIRPIPTWDEWPEFARETFQAFRTTDVGRKLIIDQNVFIEGTLPMGVVRPLTEVEMDHYREPFLNPVDREPLFRFPNELPIAGEPANIVALVEEYMDWLHQSPVPKLLFWGTPGVLIPPAEAARLAKSLPNCKAVDIGPGLNLLQEDNPDLIGSEIARWLSTLEISG

SEQ ID NO: 2270 - protein, 277 aa, Synthetic construct
MFHYVDVGPRDGTPVLFLHGNPTSSYVWRNIIPHVAPTHRCIAPDLIGMGKSDKPDLGYFFDDHVRFMDAFIEALGLEEVVLVIHDWGSALGFHWAKRNPERVKGIAFMEFIRPIPTWDEWPEFARETFQAFRTTDVGRKLIIDQNVFIEGTLPMGVVRPLTEVEMDHYREPFLNPVDREPLMRFPNELPIAGEPANIVALVEEYMDWLHQSPVPKLLFWGTPGVLIPPAEAARLAKSLPNCKAVDIGPGLNLLQEDNPDLIGSEIARWLSTLEISG

SEQ ID NO: 2271 - protein, 277 aa, Synthetic construct
MFHYVDVGPRDGTPVLFLHGNPTSSYVWRNIIPHVAPTHRCIAPDLIGMGKSDKPDLGYFFDDHVRFMDAFIEALGLEEVVLVIHDWGSALGFHWAKRNPERVKGIAFMEFIRPIPTWDEWPEFARETFQAFRTTDVGRKLIIDQNVFIEGTLPMGVVRPLTEVEMDHYREPFLNPVDREPLIRFPNELPIAGEPANIVALVEEYMDWLHQSPVPKLLFWGTPGVLIPPAEAARLAKSLPNCKAVDIGPGLNLLQEDNPDLIGSEIARWLSTLEISG

SEQ ID NO: 2272 - protein, 277 aa, Synthetic construct
MFHYVDVGPRDGTPVLFLHGNPTSSYVWRNIIPHVAPTHRCIAPDLIGMGKSDKPDLGYFFDDHVRFMDAFIEALGLEEVVLVIHDWGSALGFHWAKRNPERVKGIAFMEFIRPIPTWDEWPEFARETFQAFRTTDVGRKLIIDQNVFIEGTLPMGVVRPLTEVEMDHYREPFLNPVDREPLWQFPNELPIAGEPANIVALVEEYMDWLHQSPVPKLLFWGTPGVLIPPAEAARLAKSLPNCKAVDIGPGLNLLQEDNPDLIGSEIARWLSTLEISG

SEQ ID NO: 2273 - protein, 277 aa, Synthetic construct
MFHYVDVGPRDGTPVLFLHGNPTSSYVWRNIIPHVAPTHRCIAPDLIGMGKSDKPDLGYFFDDHVRFMDAFIEALGLEEVVLVIHDWGSALGFHWAKRNPERVKGIAFMEFIRPIPTWDEWPEFARETFQAFRTTDVGRKLIIDQNVFIEGTLPMGVVRPLTEVEMDHYREPFLNPVDREPLWKFPNELPIAGEPANIVALVEEYMDWLHQSPVPKLLFWGTPGVLIPPAEAARLAKSLPNCKAVDIGPGLNLLQEDNPDLIGSEIARWLSTLEISG

SEQ ID NO: 2274 - protein, 277 aa, Synthetic construct
MFHYVDVGPRDGTPVLFLHGNPTSSYVWRNIIPHVAPTHRCIAPDLIGMGKSDKPDLGYFFDDHVRFMDAFIEALGLEEVVLVIHDWGSALGFHWAKRNPERVKGIAFMEFIRPIPTWDEWPEFARETFQAFRTTDVGRKLIIDQNVFIEGTLPMGVVRPLTEVEMDHYREPFLNPVDREPLWAFPNELPIAGEPANIVALVEEYMDWLHQSPVPKLLFWGTPGVLIPPAEAARLAKSLPNCKAVDIGPGLNLLQEDNPDLIGSEIARWLSTLEISG

SEQ ID NO: 2275 - protein, 277 aa, Synthetic construct
MFHYVDVGPRDGTPVLFLHGNPTSSYVWRNIIPHVAPTHRCIAPDLIGMGKSDKPDLGYFFDDHVRFMDAFIEALGLEEVVLVIHDWGSALGFHWAKRNPERVKGIAFMEFIRPIPTWDEWPEFARETFQAFRTTDVGRKLIIDQNVFIEGTLPMGVVRPLTEVEMDHYREPFLNPVDREPLWTFPNELPIAGEPANIVALVEEYMDWLHQSPVPKLLFWGTPGVLIPPAEAARLAKSLPNCKAVDIGPGLNLLQEDNPDLIGSEIARWLSTLEISG

SEQ ID NO: 2276 - protein, 277 aa, Synthetic construct
MFHYVDVGPRDGTPVLFLHGNPTSSYVWRNIIPHVAPTHRCIAPDLIGMGKSDKPDLGYFFDDHVRFMDAFIEALGLEEVVLVIHDWGSALGFHWAKRNPERVKGIAFMEFIRPIPTWDEWPEFARETFQAFRTTDVGRKLIIDQNVFIEGTLPMGVVRPLTEVEMDHYREPFLNPVDREPLWSFPNELPIAGEPANIVALVEEYMDWLHQSPVPKLLFWGTPGVLIPPAEAARLAKSLPNCKAVDIGPGLNLLQEDNPDLIGSEIARWLSTLEISG

SEQ ID NO: 2277 - protein, 277 aa, Synthetic construct
MFHYVDVGPRDGTPVLFLHGNPTSSYVWRNIIPHVAPTHRCIAPDLIGMGKSDKPDLGYFFDDHVRFMDAFIEALGLEEVVLVIHDWGSALGFHWAKRNPERVKGIAFMEFIRPIPTWDEWPEFARETFQAFRTTDVGRKLIIDQNVFIEGTLPMGVVRPLTEVEMDHYREPFLNPVDREPLWLFPNELPIAGEPANIVALVEEYMDWLHQSPVPKLLFWGTPGVLIPPAEAARLAKSLPNCKAVDIGPGLNLLQEDNPDLIGSEIARWLSTLEISG

SEQ ID NO: 2278 - protein, 277 aa, Synthetic construct
MFHYVDVGPRDGTPVLFLHGNPTSSYVWRNIIPHVAPTHRCIAPDLIGMGKSDKPDLGYFFDDHVRFMDAFIEALGLEEVVLVIHDWGSALGFHWAKRNPERVKGIAFMEFIRPIPTWDEWPEFARETFQAFRTTDVGRKLIIDQNVFIEGTLPMGVVRPLTEVEMDHYREPFLNPVDREPLWRWPNELPIAGEPANIVALVEEYMDWLHQSPVPKLLFWGTPGVLIPPAEAARLAKSLPNCKAVDIGPGLNLLQEDNPDLIGSEIARWLSTLEISG

SEQ ID NO: 2279 - protein, 277 aa, Synthetic construct
MFHYVDVGPRDGTPVLFLHGNPTSSYVWRNIIPHVAPTHRCIAPDLIGMGKSDKPDLGYFFDDHVRFMDAFIEALGLEEVVLVIHDWGSALGFHWAKRNPERVKGIAFMEFIRPIPTWDEWPEFARETFQAFRTTDVGRKLIIDQNVFIEGTLPMGVVRPLTEVEMDHYREPFLNPVDREPLWRLPNELPIAGEPANIVALVEEYMDWLHQSPVPKLLFWGTPGVLIPPAEAARLAKSLPNCKAVDIGPGLNLLQEDNPDLIGSEIARWLSTLEISG

SEQ ID NO: 2280 - protein, 277 aa, Synthetic construct
MFHYVDVGPRDGTPVLFLHGNPTSSYVWRNIIPHVAPTHRCIAPDLIGMGKSDKPDLGYFFDDHVRFMDAFIEALGLEEVVLVIHDWGSALGFHWAKRNPERVKGIAFMEFIRPIPTWDEWPEFARETFQAFRTTDVGRKLIIDQNVFIEGTLPMGVVRPLTEVEMDHYREPFLNPVDREPLWRYPNELPIAGEPANIVALVEEYMDWLHQSPVPKLLFWGTPGVLIPPAEAARLAKSLPNCKAVDIGPGLNLLQEDNPDLIGSEIARWLSTLEISG

SEQ ID NO: 2281 - protein, 277 aa, Synthetic construct
MFHYVDVGPRDGTPVLFLHGNPTSSYVWRNIIPHVAPTHRCIAPDLIGMGKSDKPDLGYFFDDHVRFMDAFIEALGLEEVVLVIHDWGSALGFHWAKRNPERVKGIAFMEFIRPIPTWDEWPEFARETFQAFRTTDVGRKLIIDQNVFIEGTLPMGVVRPLTEVEMDHYREPFLNPVDREPLWRMPNELPIAGEPANIVALVEEYMDWLHQSPVPKLLFWGTPGVLIPPAEAARLAKSLPNCKAVDIGPGLNLLQEDNPDLIGSEIARWLSTLEISG

SEQ ID NO: 2282 - protein, 277 aa, Synthetic construct
MFHYVDVGPRDGTPVLFLHGNPTSSYVWRNIIPHVAPTHRCIAPDLIGMGKSDKPDLGYFFDDHVRFMDAFIEALGLEEVVLVIHDWGSALGFHWAKRNPERVKGIAFMEFIRPIPTWDEWPEFARETFQAFRTTDVGRKLIIDQNVFIEGTLPMGVVRPLTEVEMDHYREPFLNPVDREPLWRIPNELPIAGEPANIVALVEEYMDWLHQSPVPKLLFWGTPGVLIPPAEAARLAKSLPNCKAVDIGPGLNLLQEDNPDLIGSEIARWLSTLEISG

SEQ ID NO: 2283 - protein, 277 aa, Synthetic construct
MFHYVDVGPRDGTPVLFLHGNPTSSYVWRNIIPHVAPTHRCIAPDLIGMGKSDKPDLGYFFDDHVRFMDAFIEALGLEEVVLVIHDWGSALGFHWAKRNPERVKGIAFMEFIRPIPTWDEWPEFARETFQAFRTTDVGRKLIIDQNVFIEGTLPMGVVRPLTEVEMDHYREPFLNPVDREPLWRVPNELPIAGEPANIVALVEEYMDWLHQSPVPKLLFWGTPGVLIPPAEAARLAKSLPNCKAVDIGPGLNLLQEDNPDLIGSEIARWLSTLEISG

SEQ ID NO: 2284 - protein, 277 aa, Synthetic construct
MFHYVDVGPRDGTPVLFLHGNPTSSYVWRNIIPHVAPTHRCIAPDLIGMGKSDKPDLGYFFDDHVRFMDAFIEALGLEEVVLVIHDWGSALGFHWAKRNPERVKGIAFMEFIRPIPTWDEWPEFARETFQAFRTTDVGRKLIIDQNVFIEGTLPMGVVRPLTEVEMDHYREPFLNPVDREPLWRFANELPIAGEPANIVALVEEYMDWLHQSPVPKLLFWGTPGVLIPPAEAARLAKSLPNCKAVDIGPGLNLLQEDNPDLIGSEIARWLSTLEISG

SEQ ID NO: 2285 - protein, 277 aa, Synthetic construct
MFHYVDVGPRDGTPVLFLHGNPTSSYVWRNIIPHVAPTHRCIAPDLIGMGKSDKPDLGYFFDDHVRFMDAFIEALGLEEVVLVIHDWGSALGFHWAKRNPERVKGIAFMEFIRPIPTWDEWPEFARETFQAFRTTDVGRKLIIDQNVFIEGTLPMGVVRPLTEVEMDHYREPFLNPVDREPLWRFVNELPIAGEPANIVALVEEYMDWLHQSPVPKLLFWGTPGVLIPPAEAARLAKSLPNCKAVDIGPGLNLLQEDNPDLIGSEIARWLSTLEISG

SEQ ID NO: 2286 - protein, 277 aa, Synthetic construct
MFHYVDVGPRDGTPVLFLHGNPTSSYVWRNIIPHVAPTHRCIAPDLIGMGKSDKPDLGYFFDDHVRFMDAFIEALGLEEVVLVIHDWGSALGFHWAKRNPERVKGIAFMEFIRPIPTWDEWPEFARETFQAFRTTDVGRKLIIDQNVFIEGTLPMGVVRPLTEVEMDHYREPFLNPVDREPLWRFSNELPIAGEPANIVALVEEYMDWLHQSPVPKLLFWGTPGVLIPPAEAARLAKSLPNCKAVDIGPGLNLLQEDNPDLIGSEIARWLSTLEISG

SEQ ID NO: 2287 - protein, 277 aa, Synthetic construct
MFHYVDVGPRDGTPVLFLHGNPTSSYVWRNIIPHVAPTHRCIAPDLIGMGKSDKPDLGYFFDDHVRFMDAFIEALGLEEVVLVIHDWGSALGFHWAKRNPERVKGIAFMEFIRPIPTWDEWPEFARETFQAFRTTDVGRKLIIDQNVFIEGTLPMGVVRPLTEVEMDHYREPFLNPVDREPLWRFTNELPIAGEPANIVALVEEYMDWLHQSPVPKLLFWGTPGVLIPPAEAARLAKSLPNCKAVDIGPGLNLLQEDNPDLIGSEIARWLSTLEISG

SEQ ID NO: 2288 - protein, 277 aa, Synthetic construct
MFHYVDVGPRDGTPVLFLHGNPTSSYVWRNIIPHVAPTHRCIAPDLIGMGKSDKPDLGYFFDDHVRFMDAFIEALGLEEVVLVIHDWGSALGFHWAKRNPERVKGIAFMEFIRPIPTWDEWPEFARETFQAFRTTDVGRKLIIDQNVFIEGTLPMGVVRPLTEVEMDHYREPFLNPVDREPLWRFLNELPIAGEPANIVALVEEYMDWLHQSPVPKLLFWGTPGVLIPPAEAARLAKSLPNCKAVDIGPGLNLLQEDNPDLIGSEIARWLSTLEISG

SEQ ID NO: 2289 - protein, 277 aa, Synthetic construct
MFHYVDVGPRDGTPVLFLHGNPTSSYVWRNIIPHVAPTHRCIAPDLIGMGKSDKPDLGYFFDDHVRFMDAFIEALGLEEVVLVIHDWGSALGFHWAKRNPERVKGIAFMEFIRPIPTWDEWPEFARETFQAFRTTDVGRKLIIDQNVFIEGTLPMGVVRPLTEVEMDHYREPFLNPVDREPLWRFQNELPIAGEPANIVALVEEYMDWLHQSPVPKLLFWGTPGVLIPPAEAARLAKSLPNCKAVDIGPGLNLLQEDNPDLIGSEIARWLSTLEISG

SEQ ID NO: 2290 - protein, 277 aa, Synthetic construct
MFHYVDVGPRDGTPVLFLHGNPTSSYVWRNIIPHVAPTHRCIAPDLIGMGKSDKPDLGYFFDDHVRFMDAFIEALGLEEVVLVIHDWGSALGFHWAKRNPERVKGIAFMEFIRPIPTWDEWPEFARETFQAFRTTDVGRKLIIDQNVFIEGTLPMGVVRPLTEVEMDHYREPFLNPVDREPLWRFPSELPIAGEPANIVALVEEYMDWLHQSPVPKLLFWGTPGVLIPPAEAARLAKSLPNCKAVDIGPGLNLLQEDNPDLIGSEIARWLSTLEISG

SEQ ID NO: 2291 - protein, 277 aa, Synthetic construct
MFHYVDVGPRDGTPVLFLHGNPTSSYVWRNIIPHVAPTHRCIAPDLIGMGKSDKPDLGYFFDDHVRFMDAFIEALGLEEVVLVIHDWGSALGFHWAKRNPERVKGIAFMEFIRPIPTWDEWPEFARETFQAFRTTDVGRKLIIDQNVFIEGTLPMGVVRPLTEVEMDHYREPFLNPVDREPLWRFPRELPIAGEPANIVALVEEYMDWLHQSPVPKLLFWGTPGVLIPPAEAARLAKSLPNCKAVDIGPGLNLLQEDNPDLIGSEIARWLSTLEISG

SEQ ID NO: 2292 - protein, 277 aa, Synthetic construct
MFHYVDVGPRDGTPVLFLHGNPTSSYVWRNIIPHVAPTHRCIAPDLIGMGKSDKPDLGYFFDDHVRFMDAFIEALGLEEVVLVIHDWGSALGFHWAKRNPERVKGIAFMEFIRPIPTWDEWPEFARETFQAFRTTDVGRKLIIDQNVFIEGTLPMGVVRPLTEVEMDHYREPFLNPVDREPLWRFPQELPIAGEPANIVALVEEYMDWLHQSPVPKLLFWGTPGVLIPPAEAARLAKSLPNCKAVDIGPGLNLLQEDNPDLIGSEIARWLSTLEISG

SEQ ID NO: 2293 - protein, 277 aa, Synthetic construct
MFHYVDVGPRDGTPVLFLHGNPTSSYVWRNIIPHVAPTHRCIAPDLIGMGKSDKPDLGYFFDDHVRFMDAFIEALGLEEVVLVIHDWGSALGFHWAKRNPERVKGIAFMEFIRPIPTWDEWPEFARETFQAFRTTDVGRKLIIDQNVFIEGTLPMGVVRPLTEVEMDHYREPFLNPVDREPLWRFPAELPIAGEPANIVALVEEYMDWLHQSPVPKLLFWGTPGVLIPPAEAARLAKSLPNCKAVDIGPGLNLLQEDNPDLIGSEIARWLSTLEISG

SEQ ID NO: 2294 - protein, 277 aa, Synthetic construct
MFHYVDVGPRDGTPVLFLHGNPTSSYVWRNIIPHVAPTHRCIAPDLIGMGKSDKPDLGYFFDDHVRFMDAFIEALGLEEVVLVIHDWGSALGFHWAKRNPERVKGIAFMEFIRPIPTWDEWPEFARETFQAFRTTDVGRKLIIDQNVFIEGTLPMGVVRPLTEVEMDHYREPFLNPVDREPLWRFPTELPIAGEPANIVALVEEYMDWLHQSPVPKLLFWGTPGVLIPPAEAARLAKSLPNCKAVDIGPGLNLLQEDNPDLIGSEIARWLSTLEISG

SEQ ID NO: 2295 - protein, 277 aa, Synthetic construct
MFHYVDVGPRDGTPVLFLHGNPTSSYVWRNIIPHVAPTHRCIAPDLIGMGKSDKPDLGYFFDDHVRFMDAFIEALGLEEVVLVIHDWGSALGFHWAKRNPERVKGIAFMEFIRPIPTWDEWPEFARETFQAFRTTDVGRKLIIDQNVFIEGTLPMGVVRPLTEVEMDHYREPFLNPVDREPLWRFPLELPIAGEPANIVALVEEYMDWLHQSPVPKLLFWGTPGVLIPPAEAARLAKSLPNCKAVDIGPGLNLLQEDNPDLIGSEIARWLSTLEISG

SEQ ID NO: 2296 - protein, 277 aa, Synthetic construct
MFHYVDVGPRDGTPVLFLHGNPTSSYVWRNIIPHVAPTHRCIAPDLIGMGKSDKPDLGYFFDDHVRFMDAFIEALGLEEVVLVIHDWGSALGFHWAKRNPERVKGIAFMEFIRPIPTWDEWPEFARETFQAFRTTDVGRKLIIDQNVFIEGTLPMGVVRPLTEVEMDHYREPFLNPVDREPLWRFPNQLPIAGEPANIVALVEEYMDWLHQSPVPKLLFWGTPGVLIPPAEAARLAKSLPNCKAVDIGPGLNLLQEDNPDLIGSEIARWLSTLEISG

SEQ ID NO: 2297 - protein, 277 aa, Synthetic construct
MFHYVDVGPRDGTPVLFLHGNPTSSYVWRNIIPHVAPTHRCIAPDLIGMGKSDKPDLGYFFDDHVRFMDAFIEALGLEEVVLVIHDWGSALGFHWAKRNPERVKGIAFMEFIRPIPTWDEWPEFARETFQAFRTTDVGRKLIIDQNVFIEGTLPMGVVRPLTEVEMDHYREPFLNPVDREPLWRFPNDLPIAGEPANIVALVEEYMDWLHQSPVPKLLFWGTPGVLIPPAEAARLAKSLPNCKAVDIGPGLNLLQEDNPDLIGSEIARWLSTLEISG

SEQ ID NO: 2298 - protein, 277 aa, Synthetic construct
MFHYVDVGPRDGTPVLFLHGNPTSSYVWRNIIPHVAPTHRCIAPDLIGMGKSDKPDLGYFFDDHVRFMDAFIEALGLEEVVLVIHDWGSALGFHWAKRNPERVKGIAFMEFIRPIPTWDEWPEFARETFQAFRTTDVGRKLIIDQNVFIEGTLPMGVVRPLTEVEMDHYREPFLNPVDREPLWRFPNALPIAGEPANIVALVEEYMDWLHQSPVPKLLFWGTPGVLIPPAEAARLAKSLPNCKAVDIGPGLNLLQEDNPDLIGSEIARWLSTLEISG

SEQ ID NO: 2299 - protein, 277 aa, Synthetic construct
MFHYVDVGPRDGTPVLFLHGNPTSSYVWRNIIPHVAPTHRCIAPDLIGMGKSDKPDLGYFFDDHVRFMDAFIEALGLEEVVLVIHDWGSALGFHWAKRNPERVKGIAFMEFIRPIPTWDEWPEFARETFQAFRTTDVGRKLIIDQNVFIEGTLPMGVVRPLTEVEMDHYREPFLNPVDREPLWRFPNSLPIAGEPANIVALVEEYMDWLHQSPVPKLLFWGTPGVLIPPAEAARLAKSLPNCKAVDIGPGLNLLQEDNPDLIGSEIARWLSTLEISG

SEQ ID NO: 2300 - protein, 277 aa, Synthetic construct
MFHYVDVGPRDGTPVLFLHGNPTSSYVWRNIIPHVAPTHRCIAPDLIGMGKSDKPDLGYFFDDHVRFMDAFIEALGLEEVVLVIHDWGSALGFHWAKRNPERVKGIAFMEFIRPIPTWDEWPEFARETFQAFRTTDVGRKLIIDQNVFIEGTLPMGVVRPLTEVEMDHYREPFLNPVDREPLWRFPNMLPIAGEPANIVALVEEYMDWLHQSPVPKLLFWGTPGVLIPPAEAARLAKSLPNCKAVDIGPGLNLLQEDNPDLIGSEIARWLSTLEISG

SEQ ID NO: 2301 - protein, 277 aa, Synthetic construct
MFHYVDVGPRDGTPVLFLHGNPTSSYVWRNIIPHVAPTHRCIAPDLIGMGKSDKPDLGYFFDDHVRFMDAFIEALGLEEVVLVIHDWGSALGFHWAKRNPERVKGIAFMEFIRPIPTWDEWPEFARETFQAFRTTDVGRKLIIDQNVFIEGTLPMGVVRPLTEVEMDHYREPFLNPVDREPLWRFPNLLPIAGEPANIVALVEEYMDWLHQSPVPKLLFWGTPGVLIPPAEAARLAKSLPNCKAVDIGPGLNLLQEDNPDLIGSEIARWLSTLEISG

SEQ ID NO: 2302 - protein, 277 aa, Synthetic construct
MFHYVDVGPRDGTPVLFLHGNPTSSYVWRNIIPHVAPTHRCIAPDLIGMGKSDKPDLGYFFDDHVRFMDAFIEALGLEEVVLVIHDWGSALGFHWAKRNPERVKGIAFMEFIRPIPTWDEWPEFARETFQAFRTTDVGRKLIIDQNVFIEGTLPMGVVRPLTEVEMDHYREPFLNPVDREPLWRFPNEIPIAGEPANIVALVEEYMDWLHQSPVPKLLFWGTPGVLIPPAEAARLAKSLPNCKAVDIGPGLNLLQEDNPDLIGSEIARWLSTLEISG

SEQ ID NO: 2303 - protein, 277 aa, Synthetic construct
MFHYVDVGPRDGTPVLFLHGNPTSSYVWRNIIPHVAPTHRCIAPDLIGMGKSDKPDLGYFFDDHVRFMDAFIEALGLEEVVLVIHDWGSALGFHWAKRNPERVKGIAFMEFIRPIPTWDEWPEFARETFQAFRTTDVGRKLIIDQNVFIEGTLPMGVVRPLTEVEMDHYREPFLNPVDREPLWRFPNEVPIAGEPANIVALVEEYMDWLHQSPVPKLLFWGTPGVLIPPAEAARLAKSLPNCKAVDIGPGLNLLQEDNPDLIGSEIARWLSTLEISG

SEQ ID NO: 2304 - protein, 277 aa, Synthetic construct
MFHYVDVGPRDGTPVLFLHGNPTSSYVWRNIIPHVAPTHRCIAPDLIGMGKSDKPDLGYFFDDHVRFMDAFIEALGLEEVVLVIHDWGSALGFHWAKRNPERVKGIAFMEFIRPIPTWDEWPEFARETFQAFRTTDVGRKLIIDQNVFIEGTLPMGVVRPLTEVEMDHYREPFLNPVDREPLWRFPNEMPIAGEPANIVALVEEYMDWLHQSPVPKLLFWGTPGVLIPPAEAARLAKSLPNCKAVDIGPGLNLLQEDNPDLIGSEIARWLSTLEISG

SEQ ID NO: 2305 - protein, 277 aa, Synthetic construct
MFHYVDVGPRDGTPVLFLHGNPTSSYVWRNIIPHVAPTHRCIAPDLIGMGKSDKPDLGYFFDDHVRFMDAFIEALGLEEVVLVIHDWGSALGFHWAKRNPERVKGIAFMEFIRPIPTWDEWPEFARETFQAFRTTDVGRKLIIDQNVFIEGTLPMGVVRPLTEVEMDHYREPFLNPVDREPLWRFPNEFPIAGEPANIVALVEEYMDWLHQSPVPKLLFWGTPGVLIPPAEAARLAKSLPNCKAVDIGPGLNLLQEDNPDLIGSEIARWLSTLEISG

SEQ ID NO: 2306 - protein, 277 aa, Synthetic construct
MFHYVDVGPRDGTPVLFLHGNPTSSYVWRNIIPHVAPTHRCIAPDLIGMGKSDKPDLGYFFDDHVRFMDAFIEALGLEEVVLVIHDWGSALGFHWAKRNPERVKGIAFMEFIRPIPTWDEWPEFARETFQAFRTTDVGRKLIIDQNVFIEGTLPMGVVRPLTEVEMDHYREPFLNPVDREPLWRFPNETPIAGEPANIVALVEEYMDWLHQSPVPKLLFWGTPGVLIPPAEAARLAKSLPNCKAVDIGPGLNLLQEDNPDLIGSEIARWLSTLEISG

SEQ ID NO: 2307 - protein, 277 aa, Synthetic construct
MFHYVDVGPRDGTPVLFLHGNPTSSYVWRNIIPHVAPTHRCIAPDLIGMGKSDKPDLGYFFDDHVRFMDAFIEALGLEEVVLVIHDWGSALGFHWAKRNPERVKGIAFMEFIRPIPTWDEWPEFARETFQAFRTTDVGRKLIIDQNVFIEGTLPMGVVRPLTEVEMDHYREPFLNPVDREPLWRFPNEAPIAGEPANIVALVEEYMDWLHQSPVPKLLFWGTPGVLIPPAEAARLAKSLPNCKAVDIGPGLNLLQEDNPDLIGSEIARWLSTLEISG

SEQ ID NO: 2308 - protein, 277 aa, Synthetic construct
MFHYVDVGPRDGTPVLFLHGNPTSSYVWRNIIPHVAPTHRCIAPDLIGMGKSDKPDLGYFFDDHVRFMDAFIEALGLEEVVLVIHDWGSALGFHWAKRNPERVKGIAFMEFIRPIPTWDEWPEFARETFQAFRTTDVGRKLIIDQNVFIEGTLPMGVVRPLTEVEMDHYREPFLNPVDREPLWRFPNELAIAGEPANIVALVEEYMDWLHQSPVPKLLFWGTPGVLIPPAEAARLAKSLPNCKAVDIGPGLNLLQEDNPDLIGSEIARWLSTLEISG

SEQ ID NO: 2309 - protein, 277 aa, Synthetic construct
MFHYVDVGPRDGTPVLFLHGNPTSSYVWRNIIPHVAPTHRCIAPDLIGMGKSDKPDLGYFFDDHVRFMDAFIEALGLEEVVLVIHDWGSALGFHWAKRNPERVKGIAFMEFIRPIPTWDEWPEFARETFQAFRTTDVGRKLIIDQNVFIEGTLPMGVVRPLTEVEMDHYREPFLNPVDREPLWRFPNELSIAGEPANIVALVEEYMDWLHQSPVPKLLFWGTPGVLIPPAEAARLAKSLPNCKAVDIGPGLNLLQEDNPDLIGSEIARWLSTLEISG

SEQ ID NO: 2310 - protein, 277 aa, Synthetic construct
MFHYVDVGPRDGTPVLFLHGNPTSSYVWRNIIPHVAPTHRCIAPDLIGMGKSDKPDLGYFFDDHVRFMDAFIEALGLEEVVLVIHDWGSALGFHWAKRNPERVKGIAFMEFIRPIPTWDEWPEFARETFQAFRTTDVGRKLIIDQNVFIEGTLPMGVVRPLTEVEMDHYREPFLNPVDREPLWRFPNELEIAGEPANIVALVEEYMDWLHQSPVPKLLFWGTPGVLIPPAEAARLAKSLPNCKAVDIGPGLNLLQEDNPDLIGSEIARWLSTLEISG

SEQ ID NO: 2311 - protein, 277 aa, Synthetic construct
MFHYVDVGPRDGTPVLFLHGNPTSSYVWRNIIPHVAPTHRCIAPDLIGMGKSDKPDLGYFFDDHVRFMDAFIEALGLEEVVLVIHDWGSALGFHWAKRNPERVKGIAFMEFIRPIPTWDEWPEFARETFQAFRTTDVGRKLIIDQNVFIEGTLPMGVVRPLTEVEMDHYREPFLNPVDREPLWRFPNELTIAGEPANIVALVEEYMDWLHQSPVPKLLFWGTPGVLIPPAEAARLAKSLPNCKAVDIGPGLNLLQEDNPDLIGSEIARWLSTLEISG

SEQ ID NO: 2312 - protein, 277 aa, Synthetic construct
MFHYVDVGPRDGTPVLFLHGNPTSSYVWRNIIPHVAPTHRCIAPDLIGMGKSDKPDLGYFFDDHVRFMDAFIEALGLEEVVLVIHDWGSALGFHWAKRNPERVKGIAFMEFIRPIPTWDEWPEFARETFQAFRTTDVGRKLIIDQNVFIEGTLPMGVVRPLTEVEMDHYREPFLNPVDREPLWRFPNELLIAGEPANIVALVEEYMDWLHQSPVPKLLFWGTPGVLIPPAEAARLAKSLPNCKAVDIGPGLNLLQEDNPDLIGSEIARWLSTLEISG

SEQ ID NO: 2313 - protein, 277 aa, Synthetic construct
MFHYVDVGPRDGTPVLFLHGNPTSSYVWRNIIPHVAPTHRCIAPDLIGMGKSDKPDLGYFFDDHVRFMDAFIEALGLEEVVLVIHDWGSALGFHWAKRNPERVKGIAFMEFIRPIPTWDEWPEFARETFQAFRTTDVGRKLIIDQNVFIEGTLPMGVVRPLTEVEMDHYREPFLNPVDREPLWRFPNELQIAGEPANIVALVEEYMDWLHQSPVPKLLFWGTPGVLIPPAEAARLAKSLPNCKAVDIGPGLNLLQEDNPDLIGSEIARWLSTLEISG

SEQ ID NO: 2314 - protein, 277 aa, Synthetic construct
MFHYVDVGPRDGTPVLFLHGNPTSSYVWRNIIPHVAPTHRCIAPDLIGMGKSDKPDLGYFFDDHVRFMDAFIEALGLEEVVLVIHDWGSALGFHWAKRNPERVKGIAFMEFIRPIPTWDEWPEFARETFQAFRTTDVGRKLIIDQNVFIEGTLPMGVVRPLTEVEMDHYREPFLNPVDREPLWRFPNELPLAGEPANIVALVEEYMDWLHQSPVPKLLFWGTPGVLIPPAEAARLAKSLPNCKAVDIGPGLNLLQEDNPDLIGSEIARWLSTLEISG

SEQ ID NO: 2315 - protein, 277 aa, Synthetic construct
MFHYVDVGPRDGTPVLFLHGNPTSSYVWRNIIPHVAPTHRCIAPDLIGMGKSDKPDLGYFFDDHVRFMDAFIEALGLEEVVLVIHDWGSALGFHWAKRNPERVKGIAFMEFIRPIPTWDEWPEFARETFQAFRTTDVGRKLIIDQNVFIEGTLPMGVVRPLTEVEMDHYREPFLNPVDREPLWRFPNELPVAGEPANIVALVEEYMDWLHQSPVPKLLFWGTPGVLIPPAEAARLAKSLPNCKAVDIGPGLNLLQEDNPDLIGSEIARWLSTLEISG

SEQ ID NO: 2316 - protein, 277 aa, Synthetic construct
MFHYVDVGPRDGTPVLFLHGNPTSSYVWRNIIPHVAPTHRCIAPDLIGMGKSDKPDLGYFFDDHVRFMDAFIEALGLEEVVLVIHDWGSALGFHWAKRNPERVKGIAFMEFIRPIPTWDEWPEFARETFQAFRTTDVGRKLIIDQNVFIEGTLPMGVVRPLTEVEMDHYREPFLNPVDREPLWRFPNELPMAGEPANIVALVEEYMDWLHQSPVPKLLFWGTPGVLIPPAEAARLAKSLPNCKAVDIGPGLNLLQEDNPDLIGSEIARWLSTLEISG

SEQ ID NO: 2317 - protein, 277 aa, Synthetic construct
MFHYVDVGPRDGTPVLFLHGNPTSSYVWRNIIPHVAPTHRCIAPDLIGMGKSDKPDLGYFFDDHVRFMDAFIEALGLEEVVLVIHDWGSALGFHWAKRNPERVKGIAFMEFIRPIPTWDEWPEFARETFQAFRTTDVGRKLIIDQNVFIEGTLPMGVVRPLTEVEMDHYREPFLNPVDREPLWRFPNELPTAGEPANIVALVEEYMDWLHQSPVPKLLFWGTPGVLIPPAEAARLAKSLPNCKAVDIGPGLNLLQEDNPDLIGSEIARWLSTLEISG

SEQ ID NO: 2318 - protein, 277 aa, Synthetic construct
MFHYVDVGPRDGTPVLFLHGNPTSSYVWRNIIPHVAPTHRCIAPDLIGMGKSDKPDLGYFFDDHVRFMDAFIEALGLEEVVLVIHDWGSALGFHWAKRNPERVKGIAFMEFIRPIPTWDEWPEFARETFQAFRTTDVGRKLIIDQNVFIEGTLPMGVVRPLTEVEMDHYREPFLNPVDREPLWRFPNELPFAGEPANIVALVEEYMDWLHQSPVPKLLFWGTPGVLIPPAEAARLAKSLPNCKAVDIGPGLNLLQEDNPDLIGSEIARWLSTLEISG

SEQ ID NO: 2319 - protein, 277 aa, Synthetic construct
MFHYVDVGPRDGTPVLFLHGNPTSSYVWRNIIPHVAPTHRCIAPDLIGMGKSDKPDLGYFFDDHVRFMDAFIEALGLEEVVLVIHDWGSALGFHWAKRNPERVKGIAFMEFIRPIPTWDEWPEFARETFQAFRTTDVGRKLIIDQNVFIEGTLPMGVVRPLTEVEMDHYREPFLNPVDREPLWRFPNELPAAGEPANIVALVEEYMDWLHQSPVPKLLFWGTPGVLIPPAEAARLAKSLPNCKAVDIGPGLNLLQEDNPDLIGSEIARWLSTLEISG

SEQ ID NO: 2320 - protein, 277 aa, Synthetic construct
MFHYVDVGPRDGTPVLFLHGNPTSSYVWRNIIPHVAPTHRCIAPDLIGMGKSDKPDLGYFFDDHVRFMDAFIEALGLEEVVLVIHDWGSALGFHWAKRNPERVKGIAFMEFIRPIPTWDEWPEFARETFQAFRTTDVGRKLIIDQNVFIEGTLPMGVVRPLTEVEMDHYREPFLNPVDREPLWRFPNELPIEGEPANIVALVEEYMDWLHQSPVPKLLFWGTPGVLIPPAEAARLAKSLPNCKAVDIGPGLNLLQEDNPDLIGSEIARWLSTLEISG

SEQ ID NO: 2321 - protein, 277 aa, Synthetic construct
MFHYVDVGPRDGTPVLFLHGNPTSSYVWRNIIPHVAPTHRCIAPDLIGMGKSDKPDLGYFFDDHVRFMDAFIEALGLEEVVLVIHDWGSALGFHWAKRNPERVKGIAFMEFIRPIPTWDEWPEFARETFQAFRTTDVGRKLIIDQNVFIEGTLPMGVVRPLTEVEMDHYREPFLNPVDREPLWRFPNELPIDGEPANIVALVEEYMDWLHQSPVPKLLFWGTPGVLIPPAEAARLAKSLPNCKAVDIGPGLNLLQEDNPDLIGSEIARWLSTLEISG

SEQ ID NO: 2322 - protein, 277 aa, Synthetic construct
MFHYVDVGPRDGTPVLFLHGNPTSSYVWRNIIPHVAPTHRCIAPDLIGMGKSDKPDLGYFFDDHVRFMDAFIEALGLEEVVLVIHDWGSALGFHWAKRNPERVKGIAFMEFIRPIPTWDEWPEFARETFQAFRTTDVGRKLIIDQNVFIEGTLPMGVVRPLTEVEMDHYREPFLNPVDREPLWRFPNELPIGGEPANIVALVEEYMDWLHQSPVPKLLFWGTPGVLIPPAEAARLAKSLPNCKAVDIGPGLNLLQEDNPDLIGSEIARWLSTLEISG

SEQ ID NO: 2323 - protein, 277 aa, Synthetic construct
MFHYVDVGPRDGTPVLFLHGNPTSSYVWRNIIPHVAPTHRCIAPDLIGMGKSDKPDLGYFFDDHVRFMDAFIEALGLEEVVLVIHDWGSALGFHWAKRNPERVKGIAFMEFIRPIPTWDEWPEFARETFQAFRTTDVGRKLIIDQNVFIEGTLPMGVVRPLTEVEMDHYREPFLNPVDREPLWRFPNELPISGEPANIVALVEEYMDWLHQSPVPKLLFWGTPGVLIPPAEAARLAKSLPNCKAVDIGPGLNLLQEDNPDLIGSEIARWLSTLEISG

SEQ ID NO: 2324 - protein, 277 aa, Synthetic construct
MFHYVDVGPRDGTPVLFLHGNPTSSYVWRNIIPHVAPTHRCIAPDLIGMGKSDKPDLGYFFDDHVRFMDAFIEALGLEEVVLVIHDWGSALGFHWAKRNPERVKGIAFMEFIRPIPTWDEWPEFARETFQAFRTTDVGRKLIIDQNVFIEGTLPMGVVRPLTEVEMDHYREPFLNPVDREPLWRFPNELPIQGEPANIVALVEEYMDWLHQSPVPKLLFWGTPGVLIPPAEAARLAKSLPNCKAVDIGPGLNLLQEDNPDLIGSEIARWLSTLEISG

SEQ ID NO: 2325 - protein, 277 aa, Synthetic construct
MFHYVDVGPRDGTPVLFLHGNPTSSYVWRNIIPHVAPTHRCIAPDLIGMGKSDKPDLGYFFDDHVRFMDAFIEALGLEEVVLVIHDWGSALGFHWAKRNPERVKGIAFMEFIRPIPTWDEWPEFARETFQAFRTTDVGRKLIIDQNVFIEGTLPMGVVRPLTEVEMDHYREPFLNPVDREPLWRFPNELPINGEPANIVALVEEYMDWLHQSPVPKLLFWGTPGVLIPPAEAARLAKSLPNCKAVDIGPGLNLLQEDNPDLIGSEIARWLSTLEISG

SEQ ID NO: 2326 - protein, 277 aa, Synthetic construct
MFHYVDVGPRDGTPVLFLHGNPTSSYVWRNIIPHVAPTHRCIAPDLIGMGKSDKPDLGYFFDDHVRFMDAFIEALGLEEVVLVIHDWGSALGFHWAKRNPERVKGIAFMEFIRPIPTWDEWPEFARETFQAFRTTDVGRKLIIDQNVFIEGTLPMGVVRPLTEVEMDHYREPFLNPVDREPLWRFPNELPIADEPANIVALVEEYMDWLHQSPVPKLLFWGTPGVLIPPAEAARLAKSLPNCKAVDIGPGLNLLQEDNPDLIGSEIARWLSTLEISG

SEQ ID NO: 2327 - protein, 277 aa, Synthetic construct
MFHYVDVGPRDGTPVLFLHGNPTSSYVWRNIIPHVAPTHRCIAPDLIGMGKSDKPDLGYFFDDHVRFMDAFIEALGLEEVVLVIHDWGSALGFHWAKRNPERVKGIAFMEFIRPIPTWDEWPEFARETFQAFRTTDVGRKLIIDQNVFIEGTLPMGVVRPLTEVEMDHYREPFLNPVDREPLWRFPNELPIANEPANIVALVEEYMDWLHQSPVPKLLFWGTPGVLIPPAEAARLAKSLPNCKAVDIGPGLNLLQEDNPDLIGSEIARWLSTLEISG

SEQ ID NO: 2328 - protein, 277 aa, Synthetic construct
MFHYVDVGPRDGTPVLFLHGNPTSSYVWRNIIPHVAPTHRCIAPDLIGMGKSDKPDLGYFFDDHVRFMDAFIEALGLEEVVLVIHDWGSALGFHWAKRNPERVKGIAFMEFIRPIPTWDEWPEFARETFQAFRTTDVGRKLIIDQNVFIEGTLPMGVVRPLTEVEMDHYREPFLNPVDREPLWRFPNELPIAEEPANIVALVEEYMDWLHQSPVPKLLFWGTPGVLIPPAEAARLAKSLPNCKAVDIGPGLNLLQEDNPDLIGSEIARWLSTLEISG

SEQ ID NO: 2329 - protein, 277 aa, Synthetic construct
MFHYVDVGPRDGTPVLFLHGNPTSSYVWRNIIPHVAPTHRCIAPDLIGMGKSDKPDLGYFFDDHVRFMDAFIEALGLEEVVLVIHDWGSALGFHWAKRNPERVKGIAFMEFIRPIPTWDEWPEFARETFQAFRTTDVGRKLIIDQNVFIEGTLPMGVVRPLTEVEMDHYREPFLNPVDREPLWRFPNELPIAAEPANIVALVEEYMDWLHQSPVPKLLFWGTPGVLIPPAEAARLAKSLPNCKAVDIGPGLNLLQEDNPDLIGSEIARWLSTLEISG

SEQ ID NO: 2330 - protein, 277 aa, Synthetic construct
MFHYVDVGPRDGTPVLFLHGNPTSSYVWRNIIPHVAPTHRCIAPDLIGMGKSDKPDLGYFFDDHVRFMDAFIEALGLEEVVLVIHDWGSALGFHWAKRNPERVKGIAFMEFIRPIPTWDEWPEFARETFQAFRTTDVGRKLIIDQNVFIEGTLPMGVVRPLTEVEMDHYREPFLNPVDREPLWRFPNELPIASEPANIVALVEEYMDWLHQSPVPKLLFWGTPGVLIPPAEAARLAKSLPNCKAVDIGPGLNLLQEDNPDLIGSEIARWLSTLEISG

SEQ ID NO: 2331 - protein, 277 aa, Synthetic construct
MFHYVDVGPRDGTPVLFLHGNPTSSYVWRNIIPHVAPTHRCIAPDLIGMGKSDKPDLGYFFDDHVRFMDAFIEALGLEEVVLVIHDWGSALGFHWAKRNPERVKGIAFMEFIRPIPTWDEWPEFARETFQAFRTTDVGRKLIIDQNVFIEGTLPMGVVRPLTEVEMDHYREPFLNPVDREPLWRFPNELPIAREPANIVALVEEYMDWLHQSPVPKLLFWGTPGVLIPPAEAARLAKSLPNCKAVDIGPGLNLLQEDNPDLIGSEIARWLSTLEISG

SEQ ID NO: 2332 - protein, 277 aa, Synthetic construct
MFHYVDVGPRDGTPVLFLHGNPTSSYVWRNIIPHVAPTHRCIAPDLIGMGKSDKPDLGYFFDDHVRFMDAFIEALGLEEVVLVIHDWGSALGFHWAKRNPERVKGIAFMEFIRPIPTWDEWPEFARETFQAFRTTDVGRKLIIDQNVFIEGTLPMGVVRPLTEVEMDHYREPFLNPVDREPLWRFPNELPIAGDPANIVALVEEYMDWLHQSPVPKLLFWGTPGVLIPPAEAARLAKSLPNCKAVDIGPGLNLLQEDNPDLIGSEIARWLSTLEISG

SEQ ID NO: 2333 - protein, 277 aa, Synthetic construct
MFHYVDVGPRDGTPVLFLHGNPTSSYVWRNIIPHVAPTHRCIAPDLIGMGKSDKPDLGYFFDDHVRFMDAFIEALGLEEVVLVIHDWGSALGFHWAKRNPERVKGIAFMEFIRPIPTWDEWPEFARETFQAFRTTDVGRKLIIDQNVFIEGTLPMGVVRPLTEVEMDHYREPFLNPVDREPLWRFPNELPIAGQPANIVALVEEYMDWLHQSPVPKLLFWGTPGVLIPPAEAARLAKSLPNCKAVDIGPGLNLLQEDNPDLIGSEIARWLSTLEISG

SEQ ID NO: 2334 - protein, 277 aa, Synthetic construct
MFHYVDVGPRDGTPVLFLHGNPTSSYVWRNIIPHVAPTHRCIAPDLIGMGKSDKPDLGYFFDDHVRFMDAFIEALGLEEVVLVIHDWGSALGFHWAKRNPERVKGIAFMEFIRPIPTWDEWPEFARETFQAFRTTDVGRKLIIDQNVFIEGTLPMGVVRPLTEVEMDHYREPFLNPVDREPLWRFPNELPIAGAPANIVALVEEYMDWLHQSPVPKLLFWGTPGVLIPPAEAARLAKSLPNCKAVDIGPGLNLLQEDNPDLIGSEIARWLSTLEISG

SEQ ID NO: 2335 - protein, 277 aa, Synthetic construct
MFHYVDVGPRDGTPVLFLHGNPTSSYVWRNIIPHVAPTHRCIAPDLIGMGKSDKPDLGYFFDDHVRFMDAFIEALGLEEVVLVIHDWGSALGFHWAKRNPERVKGIAFMEFIRPIPTWDEWPEFARETFQAFRTTDVGRKLIIDQNVFIEGTLPMGVVRPLTEVEMDHYREPFLNPVDREPLWRFPNELPIAGTPANIVALVEEYMDWLHQSPVPKLLFWGTPGVLIPPAEAARLAKSLPNCKAVDIGPGLNLLQEDNPDLIGSEIARWLSTLEISG

SEQ ID NO: 2336 - protein, 277 aa, Synthetic construct
MFHYVDVGPRDGTPVLFLHGNPTSSYVWRNIIPHVAPTHRCIAPDLIGMGKSDKPDLGYFFDDHVRFMDAFIEALGLEEVVLVIHDWGSALGFHWAKRNPERVKGIAFMEFIRPIPTWDEWPEFARETFQAFRTTDVGRKLIIDQNVFIEGTLPMGVVRPLTEVEMDHYREPFLNPVDREPLWRFPNELPIAGKPANIVALVEEYMDWLHQSPVPKLLFWGTPGVLIPPAEAARLAKSLPNCKAVDIGPGLNLLQEDNPDLIGSEIARWLSTLEISG

SEQ ID NO: 2337 - protein, 277 aa, Synthetic construct
MFHYVDVGPRDGTPVLFLHGNPTSSYVWRNIIPHVAPTHRCIAPDLIGMGKSDKPDLGYFFDDHVRFMDAFIEALGLEEVVLVIHDWGSALGFHWAKRNPERVKGIAFMEFIRPIPTWDEWPEFARETFQAFRTTDVGRKLIIDQNVFIEGTLPMGVVRPLTEVEMDHYREPFLNPVDREPLWRFPNELPIAGSPANIVALVEEYMDWLHQSPVPKLLFWGTPGVLIPPAEAARLAKSLPNCKAVDIGPGLNLLQEDNPDLIGSEIARWLSTLEISG

SEQ ID NO: 2338 - protein, 277 aa, Synthetic construct
MFHYVDVGPRDGTPVLFLHGNPTSSYVWRNIIPHVAPTHRCIAPDLIGMGKSDKPDLGYFFDDHVRFMDAFIEALGLEEVVLVIHDWGSALGFHWAKRNPERVKGIAFMEFIRPIPTWDEWPEFARETFQAFRTTDVGRKLIIDQNVFIEGTLPMGVVRPLTEVEMDHYREPFLNPVDREPLWRFPNELPIAGEAANIVALVEEYMDWLHQSPVPKLLFWGTPGVLIPPAEAARLAKSLPNCKAVDIGPGLNLLQEDNPDLIGSEIARWLSTLEISG

SEQ ID NO: 2339 - protein, 277 aa, Synthetic construct
MFHYVDVGPRDGTPVLFLHGNPTSSYVWRNIIPHVAPTHRCIAPDLIGMGKSDKPDLGYFFDDHVRFMDAFIEALGLEEVVLVIHDWGSALGFHWAKRNPERVKGIAFMEFIRPIPTWDEWPEFARETFQAFRTTDVGRKLIIDQNVFIEGTLPMGVVRPLTEVEMDHYREPFLNPVDREPLWRFPNELPIAGESANIVALVEEYMDWLHQSPVPKLLFWGTPGVLIPPAEAARLAKSLPNCKAVDIGPGLNLLQEDNPDLIGSEIARWLSTLEISG

SEQ ID NO: 2340 - protein, 277 aa, Synthetic construct
MFHYVDVGPRDGTPVLFLHGNPTSSYVWRNIIPHVAPTHRCIAPDLIGMGKSDKPDLGYFFDDHVRFMDAFIEALGLEEVVLVIHDWGSALGFHWAKRNPERVKGIAFMEFIRPIPTWDEWPEFARETFQAFRTTDVGRKLIIDQNVFIEGTLPMGVVRPLTEVEMDHYREPFLNPVDREPLWRFPNELPIAGETANIVALVEEYMDWLHQSPVPKLLFWGTPGVLIPPAEAARLAKSLPNCKAVDIGPGLNLLQEDNPDLIGSEIARWLSTLEISG

SEQ ID NO: 2341 - protein, 277 aa, Synthetic construct
MFHYVDVGPRDGTPVLFLHGNPTSSYVWRNIIPHVAPTHRCIAPDLIGMGKSDKPDLGYFFDDHVRFMDAFIEALGLEEVVLVIHDWGSALGFHWAKRNPERVKGIAFMEFIRPIPTWDEWPEFARETFQAFRTTDVGRKLIIDQNVFIEGTLPMGVVRPLTEVEMDHYREPFLNPVDREPLWRFPNELPIAGEEANIVALVEEYMDWLHQSPVPKLLFWGTPGVLIPPAEAARLAKSLPNCKAVDIGPGLNLLQEDNPDLIGSEIARWLSTLEISG

SEQ ID NO: 2342 - protein, 277 aa, Synthetic construct
MFHYVDVGPRDGTPVLFLHGNPTSSYVWRNIIPHVAPTHRCIAPDLIGMGKSDKPDLGYFFDDHVRFMDAFIEALGLEEVVLVIHDWGSALGFHWAKRNPERVKGIAFMEFIRPIPTWDEWPEFARETFQAFRTTDVGRKLIIDQNVFIEGTLPMGVVRPLTEVEMDHYREPFLNPVDREPLWRFPNELPIAGEQANIVALVEEYMDWLHQSPVPKLLFWGTPGVLIPPAEAARLAKSLPNCKAVDIGPGLNLLQEDNPDLIGSEIARWLSTLEISG

SEQ ID NO: 2343 - protein, 277 aa, Synthetic construct
MFHYVDVGPRDGTPVLFLHGNPTSSYVWRNIIPHVAPTHRCIAPDLIGMGKSDKPDLGYFFDDHVRFMDAFIEALGLEEVVLVIHDWGSALGFHWAKRNPERVKGIAFMEFIRPIPTWDEWPEFARETFQAFRTTDVGRKLIIDQNVFIEGTLPMGVVRPLTEVEMDHYREPFLNPVDREPLWRFPNELPIAGEGANIVALVEEYMDWLHQSPVPKLLFWGTPGVLIPPAEAARLAKSLPNCKAVDIGPGLNLLQEDNPDLIGSEIARWLSTLEISG

SEQ ID NO: 2344 - protein, 277 aa, Synthetic construct
MFHYVDVGPRDGTPVLFLHGNPTSSYVWRNIIPHVAPTHRCIAPDLIGMGKSDKPDLGYFFDDHVRFMDAFIEALGLEEVVLVIHDWGSALGFHWAKRNPERVKGIAFMEFIRPIPTWDEWPEFARETFQAFRTTDVGRKLIIDQNVFIEGTLPMGVVRPLTEVEMDHYREPFLNPVDREPLWRFPNELPIAGEPENIVALVEEYMDWLHQSPVPKLLFWGTPGVLIPPAEAARLAKSLPNCKAVDIGPGLNLLQEDNPDLIGSEIARWLSTLEISG

SEQ ID NO: 2345 - protein, 277 aa, Synthetic construct
MFHYVDVGPRDGTPVLFLHGNPTSSYVWRNIIPHVAPTHRCIAPDLIGMGKSDKPDLGYFFDDHVRFMDAFIEALGLEEVVLVIHDWGSALGFHWAKRNPERVKGIAFMEFIRPIPTWDEWPEFARETFQAFRTTDVGRKLIIDQNVFIEGTLPMGVVRPLTEVEMDHYREPFLNPVDREPLWRFPNELPIAGEPDNIVALVEEYMDWLHQSPVPKLLFWGTPGVLIPPAEAARLAKSLPNCKAVDIGPGLNLLQEDNPDLIGSEIARWLSTLEISG

SEQ ID NO: 2346 - protein, 277 aa, Synthetic construct
MFHYVDVGPRDGTPVLFLHGNPTSSYVWRNIIPHVAPTHRCIAPDLIGMGKSDKPDLGYFFDDHVRFMDAFIEALGLEEVVLVIHDWGSALGFHWAKRNPERVKGIAFMEFIRPIPTWDEWPEFARETFQAFRTTDVGRKLIIDQNVFIEGTLPMGVVRPLTEVEMDHYREPFLNPVDREPLWRFPNELPIAGEPPNIVALVEEYMDWLHQSPVPKLLFWGTPGVLIPPAEAARLAKSLPNCKAVDIGPGLNLLQEDNPDLIGSEIARWLSTLEISG

SEQ ID NO: 2347 - protein, 277 aa, Synthetic construct
MFHYVDVGPRDGTPVLFLHGNPTSSYVWRNIIPHVAPTHRCIAPDLIGMGKSDKPDLGYFFDDHVRFMDAFIEALGLEEVVLVIHDWGSALGFHWAKRNPERVKGIAFMEFIRPIPTWDEWPEFARETFQAFRTTDVGRKLIIDQNVFIEGTLPMGVVRPLTEVEMDHYREPFLNPVDREPLWRFPNELPIAGEPSNIVALVEEYMDWLHQSPVPKLLFWGTPGVLIPPAEAARLAKSLPNCKAVDIGPGLNLLQEDNPDLIGSEIARWLSTLEISG

SEQ ID NO: 2348 - protein, 277 aa, Synthetic construct
MFHYVDVGPRDGTPVLFLHGNPTSSYVWRNIIPHVAPTHRCIAPDLIGMGKSDKPDLGYFFDDHVRFMDAFIEALGLEEVVLVIHDWGSALGFHWAKRNPERVKGIAFMEFIRPIPTWDEWPEFARETFQAFRTTDVGRKLIIDQNVFIEGTLPMGVVRPLTEVEMDHYREPFLNPVDREPLWRFPNELPIAGEPKNIVALVEEYMDWLHQSPVPKLLFWGTPGVLIPPAEAARLAKSLPNCKAVDIGPGLNLLQEDNPDLIGSEIARWLSTLEISG

SEQ ID NO: 2349 - protein, 277 aa, Synthetic construct
MFHYVDVGPRDGTPVLFLHGNPTSSYVWRNIIPHVAPTHRCIAPDLIGMGKSDKPDLGYFFDDHVRFMDAFIEALGLEEVVLVIHDWGSALGFHWAKRNPERVKGIAFMEFIRPIPTWDEWPEFARETFQAFRTTDVGRKLIIDQNVFIEGTLPMGVVRPLTEVEMDHYREPFLNPVDREPLWRFPNELPIAGEPQNIVALVEEYMDWLHQSPVPKLLFWGTPGVLIPPAEAARLAKSLPNCKAVDIGPGLNLLQEDNPDLIGSEIARWLSTLEISG

SEQ ID NO: 2350 - protein, 277 aa, Synthetic construct
MFHYVDVGPRDGTPVLFLHGNPTSSYVWRNIIPHVAPTHRCIAPDLIGMGKSDKPDLGYFFDDHVRFMDAFIEALGLEEVVLVIHDWGSALGFHWAKRNPERVKGIAFMEFIRPIPTWDEWPEFARETFQAFRTTDVGRKLIIDQNVFIEGTLPMGVVRPLTEVEMDHYREPFLNPVDREPLWRFPNELPIAGEPADIVALVEEYMDWLHQSPVPKLLFWGTPGVLIPPAEAARLAKSLPNCKAVDIGPGLNLLQEDNPDLIGSEIARWLSTLEISG

SEQ ID NO: 2351 - protein, 277 aa, Synthetic construct
MFHYVDVGPRDGTPVLFLHGNPTSSYVWRNIIPHVAPTHRCIAPDLIGMGKSDKPDLGYFFDDHVRFMDAFIEALGLEEVVLVIHDWGSALGFHWAKRNPERVKGIAFMEFIRPIPTWDEWPEFARETFQAFRTTDVGRKLIIDQNVFIEGTLPMGVVRPLTEVEMDHYREPFLNPVDREPLWRFPNELPIAGEPAEIVALVEEYMDWLHQSPVPKLLFWGTPGVLIPPAEAARLAKSLPNCKAVDIGPGLNLLQEDNPDLIGSEIARWLSTLEISG

SEQ ID NO: 2352 - protein, 277 aa, Synthetic construct
MFHYVDVGPRDGTPVLFLHGNPTSSYVWRNIIPHVAPTHRCIAPDLIGMGKSDKPDLGYFFDDHVRFMDAFIEALGLEEVVLVIHDWGSALGFHWAKRNPERVKGIAFMEFIRPIPTWDEWPEFARETFQAFRTTDVGRKLIIDQNVFIEGTLPMGVVRPLTEVEMDHYREPFLNPVDREPLWRFPNELPIAGEPAAIVALVEEYMDWLHQSPVPKLLFWGTPGVLIPPAEAARLAKSLPNCKAVDIGPGLNLLQEDNPDLIGSEIARWLSTLEISG

SEQ ID NO: 2353 - protein, 277 aa, Synthetic construct
MFHYVDVGPRDGTPVLFLHGNPTSSYVWRNIIPHVAPTHRCIAPDLIGMGKSDKPDLGYFFDDHVRFMDAFIEALGLEEVVLVIHDWGSALGFHWAKRNPERVKGIAFMEFIRPIPTWDEWPEFARETFQAFRTTDVGRKLIIDQNVFIEGTLPMGVVRPLTEVEMDHYREPFLNPVDREPLWRFPNELPIAGEPASIVALVEEYMDWLHQSPVPKLLFWGTPGVLIPPAEAARLAKSLPNCKAVDIGPGLNLLQEDNPDLIGSEIARWLSTLEISG

SEQ ID NO: 2354 - protein, 277 aa, Synthetic construct
MFHYVDVGPRDGTPVLFLHGNPTSSYVWRNIIPHVAPTHRCIAPDLIGMGKSDKPDLGYFFDDHVRFMDAFIEALGLEEVVLVIHDWGSALGFHWAKRNPERVKGIAFMEFIRPIPTWDEWPEFARETFQAFRTTDVGRKLIIDQNVFIEGTLPMGVVRPLTEVEMDHYREPFLNPVDREPLWRFPNELPIAGEPAHIVALVEEYMDWLHQSPVPKLLFWGTPGVLIPPAEAARLAKSLPNCKAVDIGPGLNLLQEDNPDLIGSEIARWLSTLEISG

SEQ ID NO: 2355 - protein, 277 aa, Synthetic construct
MFHYVDVGPRDGTPVLFLHGNPTSSYVWRNIIPHVAPTHRCIAPDLIGMGKSDKPDLGYFFDDHVRFMDAFIEALGLEEVVLVIHDWGSALGFHWAKRNPERVKGIAFMEFIRPIPTWDEWPEFARETFQAFRTTDVGRKLIIDQNVFIEGTLPMGVVRPLTEVEMDHYREPFLNPVDREPLWRFPNELPIAGEPAQIVALVEEYMDWLHQSPVPKLLFWGTPGVLIPPAEAARLAKSLPNCKAVDIGPGLNLLQEDNPDLIGSEIARWLSTLEISG

SEQ ID NO: 2356 - protein, 277 aa, Synthetic construct
MFHYVDVGPRDGTPVLFLHGNPTSSYVWRNIIPHVAPTHRCIAPDLIGMGKSDKPDLGYFFDDHVRFMDAFIEALGLEEVVLVIHDWGSALGFHWAKRNPERVKGIAFMEFIRPIPTWDEWPEFARETFQAFRTTDVGRKLIIDQNVFIEGTLPMGVVRPLTEVEMDHYREPFLNPVDREPLWRFPNELPIAGEPANVVALVEEYMDWLHQSPVPKLLFWGTPGVLIPPAEAARLAKSLPNCKAVDIGPGLNLLQEDNPDLIGSEIARWLSTLEISG

SEQ ID NO: 2357 - protein, 277 aa, Synthetic construct
MFHYVDVGPRDGTPVLFLHGNPTSSYVWRNIIPHVAPTHRCIAPDLIGMGKSDKPDLGYFFDDHVRFMDAFIEALGLEEVVLVIHDWGSALGFHWAKRNPERVKGIAFMEFIRPIPTWDEWPEFARETFQAFRTTDVGRKLIIDQNVFIEGTLPMGVVRPLTEVEMDHYREPFLNPVDREPLWRFPNELPIAGEPANTVALVEEYMDWLHQSPVPKLLFWGTPGVLIPPAEAARLAKSLPNCKAVDIGPGLNLLQEDNPDLIGSEIARWLSTLEISG

SEQ ID NO: 2358 - protein, 277 aa, Synthetic construct
MFHYVDVGPRDGTPVLFLHGNPTSSYVWRNIIPHVAPTHRCIAPDLIGMGKSDKPDLGYFFDDHVRFMDAFIEALGLEEVVLVIHDWGSALGFHWAKRNPERVKGIAFMEFIRPIPTWDEWPEFARETFQAFRTTDVGRKLIIDQNVFIEGTLPMGVVRPLTEVEMDHYREPFLNPVDREPLWRFPNELPIAGEPANAVALVEEYMDWLHQSPVPKLLFWGTPGVLIPPAEAARLAKSLPNCKAVDIGPGLNLLQEDNPDLIGSEIARWLSTLEISG

SEQ ID NO: 2359 - protein, 277 aa, Synthetic construct
MFHYVDVGPRDGTPVLFLHGNPTSSYVWRNIIPHVAPTHRCIAPDLIGMGKSDKPDLGYFFDDHVRFMDAFIEALGLEEVVLVIHDWGSALGFHWAKRNPERVKGIAFMEFIRPIPTWDEWPEFARETFQAFRTTDVGRKLIIDQNVFIEGTLPMGVVRPLTEVEMDHYREPFLNPVDREPLWRFPNELPIAGEPANLVALVEEYMDWLHQSPVPKLLFWGTPGVLIPPAEAARLAKSLPNCKAVDIGPGLNLLQEDNPDLIGSEIARWLSTLEISG

SEQ ID NO: 2360 - protein, 277 aa, Synthetic construct
MFHYVDVGPRDGTPVLFLHGNPTSSYVWRNIIPHVAPTHRCIAPDLIGMGKSDKPDLGYFFDDHVRFMDAFIEALGLEEVVLVIHDWGSALGFHWAKRNPERVKGIAFMEFIRPIPTWDEWPEFARETFQAFRTTDVGRKLIIDQNVFIEGTLPMGVVRPLTEVEMDHYREPFLNPVDREPLWRFPNELPIAGEPANSVALVEEYMDWLHQSPVPKLLFWGTPGVLIPPAEAARLAKSLPNCKAVDIGPGLNLLQEDNPDLIGSEIARWLSTLEISG

SEQ ID NO: 2361 - protein, 277 aa, Synthetic construct
MFHYVDVGPRDGTPVLFLHGNPTSSYVWRNIIPHVAPTHRCIAPDLIGMGKSDKPDLGYFFDDHVRFMDAFIEALGLEEVVLVIHDWGSALGFHWAKRNPERVKGIAFMEFIRPIPTWDEWPEFARETFQAFRTTDVGRKLIIDQNVFIEGTLPMGVVRPLTEVEMDHYREPFLNPVDREPLWRFPNELPIAGEPANMVALVEEYMDWLHQSPVPKLLFWGTPGVLIPPAEAARLAKSLPNCKAVDIGPGLNLLQEDNPDLIGSEIARWLSTLEISG

SEQ ID NO: 2362 - protein, 277 aa, Synthetic construct
MFHYVDVGPRDGTPVLFLHGNPTSSYVWRNIIPHVAPTHRCIAPDLIGMGKSDKPDLGYFFDDHVRFMDAFIEALGLEEVVLVIHDWGSALGFHWAKRNPERVKGIAFMEFIRPIPTWDEWPEFARETFQAFRTTDVGRKLIIDQNVFIEGTLPMGVVRPLTEVEMDHYREPFLNPVDREPLWRFPNELPIAGEPANITALVEEYMDWLHQSPVPKLLFWGTPGVLIPPAEAARLAKSLPNCKAVDIGPGLNLLQEDNPDLIGSEIARWLSTLEISG

SEQ ID NO: 2363 - protein, 277 aa, Synthetic construct
MFHYVDVGPRDGTPVLFLHGNPTSSYVWRNIIPHVAPTHRCIAPDLIGMGKSDKPDLGYFFDDHVRFMDAFIEALGLEEVVLVIHDWGSALGFHWAKRNPERVKGIAFMEFIRPIPTWDEWPEFARETFQAFRTTDVGRKLIIDQNVFIEGTLPMGVVRPLTEVEMDHYREPFLNPVDREPLWRFPNELPIAGEPANIAALVEEYMDWLHQSPVPKLLFWGTPGVLIPPAEAARLAKSLPNCKAVDIGPGLNLLQEDNPDLIGSEIARWLSTLEISG

SEQ ID NO: 2364 - protein, 277 aa, Synthetic construct
MFHYVDVGPRDGTPVLFLHGNPTSSYVWRNIIPHVAPTHRCIAPDLIGMGKSDKPDLGYFFDDHVRFMDAFIEALGLEEVVLVIHDWGSALGFHWAKRNPERVKGIAFMEFIRPIPTWDEWPEFARETFQAFRTTDVGRKLIIDQNVFIEGTLPMGVVRPLTEVEMDHYREPFLNPVDREPLWRFPNELPIAGEPANIIALVEEYMDWLHQSPVPKLLFWGTPGVLIPPAEAARLAKSLPNCKAVDIGPGLNLLQEDNPDLIGSEIARWLSTLEISG

SEQ ID NO: 2365 - protein, 277 aa, Synthetic construct
MFHYVDVGPRDGTPVLFLHGNPTSSYVWRNIIPHVAPTHRCIAPDLIGMGKSDKPDLGYFFDDHVRFMDAFIEALGLEEVVLVIHDWGSALGFHWAKRNPERVKGIAFMEFIRPIPTWDEWPEFARETFQAFRTTDVGRKLIIDQNVFIEGTLPMGVVRPLTEVEMDHYREPFLNPVDREPLWRFPNELPIAGEPANILALVEEYMDWLHQSPVPKLLFWGTPGVLIPPAEAARLAKSLPNCKAVDIGPGLNLLQEDNPDLIGSEIARWLSTLEISG

SEQ ID NO: 2366 - protein, 277 aa, Synthetic construct
MFHYVDVGPRDGTPVLFLHGNPTSSYVWRNIIPHVAPTHRCIAPDLIGMGKSDKPDLGYFFDDHVRFMDAFIEALGLEEVVLVIHDWGSALGFHWAKRNPERVKGIAFMEFIRPIPTWDEWPEFARETFQAFRTTDVGRKLIIDQNVFIEGTLPMGVVRPLTEVEMDHYREPFLNPVDREPLWRFPNELPIAGEPANISALVEEYMDWLHQSPVPKLLFWGTPGVLIPPAEAARLAKSLPNCKAVDIGPGLNLLQEDNPDLIGSEIARWLSTLEISG

SEQ ID NO: 2367 - protein, 277 aa, Synthetic construct
MFHYVDVGPRDGTPVLFLHGNPTSSYVWRNIIPHVAPTHRCIAPDLIGMGKSDKPDLGYFFDDHVRFMDAFIEALGLEEVVLVIHDWGSALGFHWAKRNPERVKGIAFMEFIRPIPTWDEWPEFARETFQAFRTTDVGRKLIIDQNVFIEGTLPMGVVRPLTEVEMDHYREPFLNPVDREPLWRFPNELPIAGEPANIRALVEEYMDWLHQSPVPKLLFWGTPGVLIPPAEAARLAKSLPNCKAVDIGPGLNLLQEDNPDLIGSEIARWLSTLEISG

SEQ ID NO: 2368 - protein, 277 aa, Synthetic construct
MFHYVDVGPRDGTPVLFLHGNPTSSYVWRNIIPHVAPTHRCIAPDLIGMGKSDKPDLGYFFDDHVRFMDAFIEALGLEEVVLVIHDWGSALGFHWAKRNPERVKGIAFMEFIRPIPTWDEWPEFARETFQAFRTTDVGRKLIIDQNVFIEGTLPMGVVRPLTEVEMDHYREPFLNPVDREPLWRFPNELPIAGEPANIVRLVEEYMDWLHQSPVPKLLFWGTPGVLIPPAEAARLAKSLPNCKAVDIGPGLNLLQEDNPDLIGSEIARWLSTLEISG

SEQ ID NO: 2369 - protein, 277 aa, Synthetic construct
MFHYVDVGPRDGTPVLFLHGNPTSSYVWRNIIPHVAPTHRCIAPDLIGMGKSDKPDLGYFFDDHVRFMDAFIEALGLEEVVLVIHDWGSALGFHWAKRNPERVKGIAFMEFIRPIPTWDEWPEFARETFQAFRTTDVGRKLIIDQNVFIEGTLPMGVVRPLTEVEMDHYREPFLNPVDREPLWRFPNELPIAGEPANIVKLVEEYMDWLHQSPVPKLLFWGTPGVLIPPAEAARLAKSLPNCKAVDIGPGLNLLQEDNPDLIGSEIARWLSTLEISG

SEQ ID NO: 2370 - protein, 277 aa, Synthetic construct
MFHYVDVGPRDGTPVLFLHGNPTSSYVWRNIIPHVAPTHRCIAPDLIGMGKSDKPDLGYFFDDHVRFMDAFIEALGLEEVVLVIHDWGSALGFHWAKRNPERVKGIAFMEFIRPIPTWDEWPEFARETFQAFRTTDVGRKLIIDQNVFIEGTLPMGVVRPLTEVEMDHYREPFLNPVDREPLWRFPNELPIAGEPANIVELVEEYMDWLHQSPVPKLLFWGTPGVLIPPAEAARLAKSLPNCKAVDIGPGLNLLQEDNPDLIGSEIARWLSTLEISG

SEQ ID NO: 2371 - protein, 277 aa, Synthetic construct
MFHYVDVGPRDGTPVLFLHGNPTSSYVWRNIIPHVAPTHRCIAPDLIGMGKSDKPDLGYFFDDHVRFMDAFIEALGLEEVVLVIHDWGSALGFHWAKRNPERVKGIAFMEFIRPIPTWDEWPEFARETFQAFRTTDVGRKLIIDQNVFIEGTLPMGVVRPLTEVEMDHYREPFLNPVDREPLWRFPNELPIAGEPANIVPLVEEYMDWLHQSPVPKLLFWGTPGVLIPPAEAARLAKSLPNCKAVDIGPGLNLLQEDNPDLIGSEIARWLSTLEISG

SEQ ID NO: 2372 - protein, 277 aa, Synthetic construct
MFHYVDVGPRDGTPVLFLHGNPTSSYVWRNIIPHVAPTHRCIAPDLIGMGKSDKPDLGYFFDDHVRFMDAFIEALGLEEVVLVIHDWGSALGFHWAKRNPERVKGIAFMEFIRPIPTWDEWPEFARETFQAFRTTDVGRKLIIDQNVFIEGTLPMGVVRPLTEVEMDHYREPFLNPVDREPLWRFPNELPIAGEPANIVSLVEEYMDWLHQSPVPKLLFWGTPGVLIPPAEAARLAKSLPNCKAVDIGPGLNLLQEDNPDLIGSEIARWLSTLEISG

SEQ ID NO: 2373 - protein, 277 aa, Synthetic construct
MFHYVDVGPRDGTPVLFLHGNPTSSYVWRNIIPHVAPTHRCIAPDLIGMGKSDKPDLGYFFDDHVRFMDAFIEALGLEEVVLVIHDWGSALGFHWAKRNPERVKGIAFMEFIRPIPTWDEWPEFARETFQAFRTTDVGRKLIIDQNVFIEGTLPMGVVRPLTEVEMDHYREPFLNPVDREPLWRFPNELPIAGEPANIVGLVEEYMDWLHQSPVPKLLFWGTPGVLIPPAEAARLAKSLPNCKAVDIGPGLNLLQEDNPDLIGSEIARWLSTLEISG

SEQ ID NO: 2374 - protein, 277 aa, Synthetic construct
MFHYVDVGPRDGTPVLFLHGNPTSSYVWRNIIPHVAPTHRCIAPDLIGMGKSDKPDLGYFFDDHVRFMDAFIEALGLEEVVLVIHDWGSALGFHWAKRNPERVKGIAFMEFIRPIPTWDEWPEFARETFQAFRTTDVGRKLIIDQNVFIEGTLPMGVVRPLTEVEMDHYREPFLNPVDREPLWRFPNELPIAGEPANIVAIVEEYMDWLHQSPVPKLLFWGTPGVLIPPAEAARLAKSLPNCKAVDIGPGLNLLQEDNPDLIGSEIARWLSTLEISG

SEQ ID NO: 2375 - protein, 277 aa, Synthetic construct
MFHYVDVGPRDGTPVLFLHGNPTSSYVWRNIIPHVAPTHRCIAPDLIGMGKSDKPDLGYFFDDHVRFMDAFIEALGLEEVVLVIHDWGSALGFHWAKRNPERVKGIAFMEFIRPIPTWDEWPEFARETFQAFRTTDVGRKLIIDQNVFIEGTLPMGVVRPLTEVEMDHYREPFLNPVDREPLWRFPNELPIAGEPANIVAVVEEYMDWLHQSPVPKLLFWGTPGVLIPPAEAARLAKSLPNCKAVDIGPGLNLLQEDNPDLIGSEIARWLSTLEISG

SEQ ID NO: 2376 - protein, 277 aa, Synthetic construct
MFHYVDVGPRDGTPVLFLHGNPTSSYVWRNIIPHVAPTHRCIAPDLIGMGKSDKPDLGYFFDDHVRFMDAFIEALGLEEVVLVIHDWGSALGFHWAKRNPERVKGIAFMEFIRPIPTWDEWPEFARETFQAFRTTDVGRKLIIDQNVFIEGTLPMGVVRPLTEVEMDHYREPFLNPVDREPLWRFPNELPIAGEPANIVARVEEYMDWLHQSPVPKLLFWGTPGVLIPPAEAARLAKSLPNCKAVDIGPGLNLLQEDNPDLIGSEIARWLSTLEISG

SEQ ID NO: 2377 - protein, 277 aa, Synthetic construct
MFHYVDVGPRDGTPVLFLHGNPTSSYVWRNIIPHVAPTHRCIAPDLIGMGKSDKPDLGYFFDDHVRFMDAFIEALGLEEVVLVIHDWGSALGFHWAKRNPERVKGIAFMEFIRPIPTWDEWPEFARETFQAFRTTDVGRKLIIDQNVFIEGTLPMGVVRPLTEVEMDHYREPFLNPVDREPLWRFPNELPIAGEPANIVAAVEEYMDWLHQSPVPKLLFWGTPGVLIPPAEAARLAKSLPNCKAVDIGPGLNLLQEDNPDLIGSEIARWLSTLEISG

SEQ ID NO: 2378 - protein, 277 aa, Synthetic construct
MFHYVDVGPRDGTPVLFLHGNPTSSYVWRNIIPHVAPTHRCIAPDLIGMGKSDKPDLGYFFDDHVRFMDAFIEALGLEEVVLVIHDWGSALGFHWAKRNPERVKGIAFMEFIRPIPTWDEWPEFARETFQAFRTTDVGRKLIIDQNVFIEGTLPMGVVRPLTEVEMDHYREPFLNPVDREPLWRFPNELPIAGEPANIVATVEEYMDWLHQSPVPKLLFWGTPGVLIPPAEAARLAKSLPNCKAVDIGPGLNLLQEDNPDLIGSEIARWLSTLEISG

SEQ ID NO: 2379 - protein, 277 aa, Synthetic construct
MFHYVDVGPRDGTPVLFLHGNPTSSYVWRNIIPHVAPTHRCIAPDLIGMGKSDKPDLGYFFDDHVRFMDAFIEALGLEEVVLVIHDWGSALGFHWAKRNPERVKGIAFMEFIRPIPTWDEWPEFARETFQAFRTTDVGRKLIIDQNVFIEGTLPMGVVRPLTEVEMDHYREPFLNPVDREPLWRFPNELPIAGEPANIVAKVEEYMDWLHQSPVPKLLFWGTPGVLIPPAEAARLAKSLPNCKAVDIGPGLNLLQEDNPDLIGSEIARWLSTLEISG

SEQ ID NO: 2380 - protein, 277 aa, Synthetic construct
MFHYVDVGPRDGTPVLFLHGNPTSSYVWRNIIPHVAPTHRCIAPDLIGMGKSDKPDLGYFFDDHVRFMDAFIEALGLEEVVLVIHDWGSALGFHWAKRNPERVKGIAFMEFIRPIPTWDEWPEFARETFQAFRTTDVGRKLIIDQNVFIEGTLPMGVVRPLTEVEMDHYREPFLNPVDREPLWRFPNELPIAGEPANIVALIEEYMDWLHQSPVPKLLFWGTPGVLIPPAEAARLAKSLPNCKAVDIGPGLNLLQEDNPDLIGSEIARWLSTLEISG

SEQ ID NO: 2381 - protein, 277 aa, Synthetic construct
MFHYVDVGPRDGTPVLFLHGNPTSSYVWRNIIPHVAPTHRCIAPDLIGMGKSDKPDLGYFFDDHVRFMDAFIEALGLEEVVLVIHDWGSALGFHWAKRNPERVKGIAFMEFIRPIPTWDEWPEFARETFQAFRTTDVGRKLIIDQNVFIEGTLPMGVVRPLTEVEMDHYREPFLNPVDREPLWRFPNELPIAGEPANIVALTEEYMDWLHQSPVPKLLFWGTPGVLIPPAEAARLAKSLPNCKAVDIGPGLNLLQEDNPDLIGSEIARWLSTLEISG

SEQ ID NO: 2382 - protein, 277 aa, Synthetic construct
MFHYVDVGPRDGTPVLFLHGNPTSSYVWRNIIPHVAPTHRCIAPDLIGMGKSDKPDLGYFFDDHVRFMDAFIEALGLEEVVLVIHDWGSALGFHWAKRNPERVKGIAFMEFIRPIPTWDEWPEFARETFQAFRTTDVGRKLIIDQNVFIEGTLPMGVVRPLTEVEMDHYREPFLNPVDREPLWRFPNELPIAGEPANIVALAEEYMDWLHQSPVPKLLFWGTPGVLIPPAEAARLAKSLPNCKAVDIGPGLNLLQEDNPDLIGSEIARWLSTLEISG

SEQ ID NO: 2383 - protein, 277 aa, Synthetic construct
MFHYVDVGPRDGTPVLFLHGNPTSSYVWRNIIPHVAPTHRCIAPDLIGMGKSDKPDLGYFFDDHVRFMDAFIEALGLEEVVLVIHDWGSALGFHWAKRNPERVKGIAFMEFIRPIPTWDEWPEFARETFQAFRTTDVGRKLIIDQNVFIEGTLPMGVVRPLTEVEMDHYREPFLNPVDREPLWRFPNELPIAGEPANIVALLEEYMDWLHQSPVPKLLFWGTPGVLIPPAEAARLAKSLPNCKAVDIGPGLNLLQEDNPDLIGSEIARWLSTLEISG

SEQ ID NO: 2384 - protein, 277 aa, Synthetic construct
MFHYVDVGPRDGTPVLFLHGNPTSSYVWRNIIPHVAPTHRCIAPDLIGMGKSDKPDLGYFFDDHVRFMDAFIEALGLEEVVLVIHDWGSALGFHWAKRNPERVKGIAFMEFIRPIPTWDEWPEFARETFQAFRTTDVGRKLIIDQNVFIEGTLPMGVVRPLTEVEMDHYREPFLNPVDREPLWRFPNELPIAGEPANIVALMEEYMDWLHQSPVPKLLFWGTPGVLIPPAEAARLAKSLPNCKAVDIGPGLNLLQEDNPDLIGSEIARWLSTLEISG

SEQ ID NO: 2385 - protein, 277 aa, Synthetic construct
MFHYVDVGPRDGTPVLFLHGNPTSSYVWRNIIPHVAPTHRCIAPDLIGMGKSDKPDLGYFFDDHVRFMDAFIEALGLEEVVLVIHDWGSALGFHWAKRNPERVKGIAFMEFIRPIPTWDEWPEFARETFQAFRTTDVGRKLIIDQNVFIEGTLPMGVVRPLTEVEMDHYREPFLNPVDREPLWRFPNELPIAGEPANIVALSEEYMDWLHQSPVPKLLFWGTPGVLIPPAEAARLAKSLPNCKAVDIGPGLNLLQEDNPDLIGSEIARWLSTLEISG

SEQ ID NO: 2386 - protein, 277 aa, Synthetic construct
MFHYVDVGPRDGTPVLFLHGNPTSSYVWRNIIPHVAPTHRCIAPDLIGMGKSDKPDLGYFFDDHVRFMDAFIEALGLEEVVLVIHDWGSALGFHWAKRNPERVKGIAFMEFIRPIPTWDEWPEFARETFQAFRTTDVGRKLIIDQNVFIEGTLPMGVVRPLTEVEMDHYREPFLNPVDREPLWRFPNELPIAGEPANIVALVDEYMDWLHQSPVPKLLFWGTPGVLIPPAEAARLAKSLPNCKAVDIGPGLNLLQEDNPDLIGSEIARWLSTLEISG

SEQ ID NO: 2387 - protein, 277 aa, Synthetic construct
MFHYVDVGPRDGTPVLFLHGNPTSSYVWRNIIPHVAPTHRCIAPDLIGMGKSDKPDLGYFFDDHVRFMDAFIEALGLEEVVLVIHDWGSALGFHWAKRNPERVKGIAFMEFIRPIPTWDEWPEFARETFQAFRTTDVGRKLIIDQNVFIEGTLPMGVVRPLTEVEMDHYREPFLNPVDREPLWRFPNELPIAGEPANIVALVAEYMDWLHQSPVPKLLFWGTPGVLIPPAEAARLAKSLPNCKAVDIGPGLNLLQEDNPDLIGSEIARWLSTLEISG

SEQ ID NO: 2388 - protein, 277 aa, Synthetic construct
MFHYVDVGPRDGTPVLFLHGNPTSSYVWRNIIPHVAPTHRCIAPDLIGMGKSDKPDLGYFFDDHVRFMDAFIEALGLEEVVLVIHDWGSALGFHWAKRNPERVKGIAFMEFIRPIPTWDEWPEFARETFQAFRTTDVGRKLIIDQNVFIEGTLPMGVVRPLTEVEMDHYREPFLNPVDREPLWRFPNELPIAGEPANIVALVQEYMDWLHQSPVPKLLFWGTPGVLIPPAEAARLAKSLPNCKAVDIGPGLNLLQEDNPDLIGSEIARWLSTLEISG

SEQ ID NO: 2389 - protein, 277 aa, Synthetic construct
MFHYVDVGPRDGTPVLFLHGNPTSSYVWRNIIPHVAPTHRCIAPDLIGMGKSDKPDLGYFFDDHVRFMDAFIEALGLEEVVLVIHDWGSALGFHWAKRNPERVKGIAFMEFIRPIPTWDEWPEFARETFQAFRTTDVGRKLIIDQNVFIEGTLPMGVVRPLTEVEMDHYREPFLNPVDREPLWRFPNELPIAGEPANIVALVNEYMDWLHQSPVPKLLFWGTPGVLIPPAEAARLAKSLPNCKAVDIGPGLNLLQEDNPDLIGSEIARWLSTLEISG

SEQ ID NO: 2390 - protein, 277 aa, Synthetic construct
MFHYVDVGPRDGTPVLFLHGNPTSSYVWRNIIPHVAPTHRCIAPDLIGMGKSDKPDLGYFFDDHVRFMDAFIEALGLEEVVLVIHDWGSALGFHWAKRNPERVKGIAFMEFIRPIPTWDEWPEFARETFQAFRTTDVGRKLIIDQNVFIEGTLPMGVVRPLTEVEMDHYREPFLNPVDREPLWRFPNELPIAGEPANIVALVGEYMDWLHQSPVPKLLFWGTPGVLIPPAEAARLAKSLPNCKAVDIGPGLNLLQEDNPDLIGSEIARWLSTLEISG

SEQ ID NO: 2391 - protein, 277 aa, Synthetic construct
MFHYVDVGPRDGTPVLFLHGNPTSSYVWRNIIPHVAPTHRCIAPDLIGMGKSDKPDLGYFFDDHVRFMDAFIEALGLEEVVLVIHDWGSALGFHWAKRNPERVKGIAFMEFIRPIPTWDEWPEFARETFQAFRTTDVGRKLIIDQNVFIEGTLPMGVVRPLTEVEMDHYREPFLNPVDREPLWRFPNELPIAGEPANIVALVREYMDWLHQSPVPKLLFWGTPGVLIPPAEAARLAKSLPNCKAVDIGPGLNLLQEDNPDLIGSEIARWLSTLEISG

SEQ ID NO: 2392 - protein, 277 aa, Synthetic construct
MFHYVDVGPRDGTPVLFLHGNPTSSYVWRNIIPHVAPTHRCIAPDLIGMGKSDKPDLGYFFDDHVRFMDAFIEALGLEEVVLVIHDWGSALGFHWAKRNPERVKGIAFMEFIRPIPTWDEWPEFARETFQAFRTTDVGRKLIIDQNVFIEGTLPMGVVRPLTEVEMDHYREPFLNPVDREPLWRFPNELPIAGEPANIVALVEAYMDWLHQSPVPKLLFWGTPGVLIPPAEAARLAKSLPNCKAVDIGPGLNLLQEDNPDLIGSEIARWLSTLEISG

SEQ ID NO: 2393 - protein, 277 aa, Synthetic construct
MFHYVDVGPRDGTPVLFLHGNPTSSYVWRNIIPHVAPTHRCIAPDLIGMGKSDKPDLGYFFDDHVRFMDAFIEALGLEEVVLVIHDWGSALGFHWAKRNPERVKGIAFMEFIRPIPTWDEWPEFARETFQAFRTTDVGRKLIIDQNVFIEGTLPMGVVRPLTEVEMDHYREPFLNPVDREPLWRFPNELPIAGEPANIVALVERYMDWLHQSPVPKLLFWGTPGVLIPPAEAARLAKSLPNCKAVDIGPGLNLLQEDNPDLIGSEIARWLSTLEISG

SEQ ID NO: 2394 - protein, 277 aa, Synthetic construct
MFHYVDVGPRDGTPVLFLHGNPTSSYVWRNIIPHVAPTHRCIAPDLIGMGKSDKPDLGYFFDDHVRFMDAFIEALGLEEVVLVIHDWGSALGFHWAKRNPERVKGIAFMEFIRPIPTWDEWPEFARETFQAFRTTDVGRKLIIDQNVFIEGTLPMGVVRPLTEVEMDHYREPFLNPVDREPLWRFPNELPIAGEPANIVALVESYMDWLHQSPVPKLLFWGTPGVLIPPAEAARLAKSLPNCKAVDIGPGLNLLQEDNPDLIGSEIARWLSTLEISG

SEQ ID NO: 2395 - protein, 277 aa, Synthetic construct
MFHYVDVGPRDGTPVLFLHGNPTSSYVWRNIIPHVAPTHRCIAPDLIGMGKSDKPDLGYFFDDHVRFMDAFIEALGLEEVVLVIHDWGSALGFHWAKRNPERVKGIAFMEFIRPIPTWDEWPEFARETFQAFRTTDVGRKLIIDQNVFIEGTLPMGVVRPLTEVEMDHYREPFLNPVDREPLWRFPNELPIAGEPANIVALVEGYMDWLHQSPVPKLLFWGTPGVLIPPAEAARLAKSLPNCKAVDIGPGLNLLQEDNPDLIGSEIARWLSTLEISG

SEQ ID NO: 2396 - protein, 277 aa, Synthetic construct
MFHYVDVGPRDGTPVLFLHGNPTSSYVWRNIIPHVAPTHRCIAPDLIGMGKSDKPDLGYFFDDHVRFMDAFIEALGLEEVVLVIHDWGSALGFHWAKRNPERVKGIAFMEFIRPIPTWDEWPEFARETFQAFRTTDVGRKLIIDQNVFIEGTLPMGVVRPLTEVEMDHYREPFLNPVDREPLWRFPNELPIAGEPANIVALVEDYMDWLHQSPVPKLLFWGTPGVLIPPAEAARLAKSLPNCKAVDIGPGLNLLQEDNPDLIGSEIARWLSTLEISG

SEQ ID NO: 2397 - protein, 277 aa, Synthetic construct
MFHYVDVGPRDGTPVLFLHGNPTSSYVWRNIIPHVAPTHRCIAPDLIGMGKSDKPDLGYFFDDHVRFMDAFIEALGLEEVVLVIHDWGSALGFHWAKRNPERVKGIAFMEFIRPIPTWDEWPEFARETFQAFRTTDVGRKLIIDQNVFIEGTLPMGVVRPLTEVEMDHYREPFLNPVDREPLWRFPNELPIAGEPANIVALVEQYMDWLHQSPVPKLLFWGTPGVLIPPAEAARLAKSLPNCKAVDIGPGLNLLQEDNPDLIGSEIARWLSTLEISG

SEQ ID NO: 2398 - protein, 277 aa, Synthetic construct
MFHYVDVGPRDGTPVLFLHGNPTSSYVWRNIIPHVAPTHRCIAPDLIGMGKSDKPDLGYFFDDHVRFMDAFIEALGLEEVVLVIHDWGSALGFHWAKRNPERVKGIAFMEFIRPIPTWDEWPEFARETFQAFRTTDVGRKLIIDQNVFIEGTLPMGVVRPLTEVEMDHYREPFLNPVDREPLWRFPNELPIAGEPANIVALVEENMDWLHQSPVPKLLFWGTPGVLIPPAEAARLAKSLPNCKAVDIGPGLNLLQEDNPDLIGSEIARWLSTLEISG

SEQ ID NO: 2399 - protein, 277 aa, Synthetic construct
MFHYVDVGPRDGTPVLFLHGNPTSSYVWRNIIPHVAPTHRCIAPDLIGMGKSDKPDLGYFFDDHVRFMDAFIEALGLEEVVLVIHDWGSALGFHWAKRNPERVKGIAFMEFIRPIPTWDEWPEFARETFQAFRTTDVGRKLIIDQNVFIEGTLPMGVVRPLTEVEMDHYREPFLNPVDREPLWRFPNELPIAGEPANIVALVEEHMDWLHQSPVPKLLFWGTPGVLIPPAEAARLAKSLPNCKAVDIGPGLNLLQEDNPDLIGSEIARWLSTLEISG

SEQ ID NO: 2400 - protein, 277 aa, Synthetic construct
MFHYVDVGPRDGTPVLFLHGNPTSSYVWRNIIPHVAPTHRCIAPDLIGMGKSDKPDLGYFFDDHVRFMDAFIEALGLEEVVLVIHDWGSALGFHWAKRNPERVKGIAFMEFIRPIPTWDEWPEFARETFQAFRTTDVGRKLIIDQNVFIEGTLPMGVVRPLTEVEMDHYREPFLNPVDREPLWRFPNELPIAGEPANIVALVEESMDWLHQSPVPKLLFWGTPGVLIPPAEAARLAKSLPNCKAVDIGPGLNLLQEDNPDLIGSEIARWLSTLEISG

SEQ ID NO: 2401 - protein, 277 aa, Synthetic construct
MFHYVDVGPRDGTPVLFLHGNPTSSYVWRNIIPHVAPTHRCIAPDLIGMGKSDKPDLGYFFDDHVRFMDAFIEALGLEEVVLVIHDWGSALGFHWAKRNPERVKGIAFMEFIRPIPTWDEWPEFARETFQAFRTTDVGRKLIIDQNVFIEGTLPMGVVRPLTEVEMDHYREPFLNPVDREPLWRFPNELPIAGEPANIVALVEEFMDWLHQSPVPKLLFWGTPGVLIPPAEAARLAKSLPNCKAVDIGPGLNLLQEDNPDLIGSEIARWLSTLEISG

SEQ ID NO: 2402 - protein, 277 aa, Synthetic construct
MFHYVDVGPRDGTPVLFLHGNPTSSYVWRNIIPHVAPTHRCIAPDLIGMGKSDKPDLGYFFDDHVRFMDAFIEALGLEEVVLVIHDWGSALGFHWAKRNPERVKGIAFMEFIRPIPTWDEWPEFARETFQAFRTTDVGRKLIIDQNVFIEGTLPMGVVRPLTEVEMDHYREPFLNPVDREPLWRFPNELPIAGEPANIVALVEETMDWLHQSPVPKLLFWGTPGVLIPPAEAARLAKSLPNCKAVDIGPGLNLLQEDNPDLIGSEIARWLSTLEISG

SEQ ID NO: 2403 - protein, 277 aa, Synthetic construct
MFHYVDVGPRDGTPVLFLHGNPTSSYVWRNIIPHVAPTHRCIAPDLIGMGKSDKPDLGYFFDDHVRFMDAFIEALGLEEVVLVIHDWGSALGFHWAKRNPERVKGIAFMEFIRPIPTWDEWPEFARETFQAFRTTDVGRKLIIDQNVFIEGTLPMGVVRPLTEVEMDHYREPFLNPVDREPLWRFPNELPIAGEPANIVALVEEAMDWLHQSPVPKLLFWGTPGVLIPPAEAARLAKSLPNCKAVDIGPGLNLLQEDNPDLIGSEIARWLSTLEISG

SEQ ID NO: 2404 - protein, 277 aa, Synthetic construct
MFHYVDVGPRDGTPVLFLHGNPTSSYVWRNIIPHVAPTHRCIAPDLIGMGKSDKPDLGYFFDDHVRFMDAFIEALGLEEVVLVIHDWGSALGFHWAKRNPERVKGIAFMEFIRPIPTWDEWPEFARETFQAFRTTDVGRKLIIDQNVFIEGTLPMGVVRPLTEVEMDHYREPFLNPVDREPLWRFPNELPIAGEPANIVALVEEYADWLHQSPVPKLLFWGTPGVLIPPAEAARLAKSLPNCKAVDIGPGLNLLQEDNPDLIGSEIARWLSTLEISG

SEQ ID NO: 2405 - protein, 277 aa, Synthetic construct
MFHYVDVGPRDGTPVLFLHGNPTSSYVWRNIIPHVAPTHRCIAPDLIGMGKSDKPDLGYFFDDHVRFMDAFIEALGLEEVVLVIHDWGSALGFHWAKRNPERVKGIAFMEFIRPIPTWDEWPEFARETFQAFRTTDVGRKLIIDQNVFIEGTLPMGVVRPLTEVEMDHYREPFLNPVDREPLWRFPNELPIAGEPANIVALVEEYGDWLHQSPVPKLLFWGTPGVLIPPAEAARLAKSLPNCKAVDIGPGLNLLQEDNPDLIGSEIARWLSTLEISG

SEQ ID NO: 2406 - protein, 277 aa, Synthetic construct
MFHYVDVGPRDGTPVLFLHGNPTSSYVWRNIIPHVAPTHRCIAPDLIGMGKSDKPDLGYFFDDHVRFMDAFIEALGLEEVVLVIHDWGSALGFHWAKRNPERVKGIAFMEFIRPIPTWDEWPEFARETFQAFRTTDVGRKLIIDQNVFIEGTLPMGVVRPLTEVEMDHYREPFLNPVDREPLWRFPNELPIAGEPANIVALVEEYSDWLHQSPVPKLLFWGTPGVLIPPAEAARLAKSLPNCKAVDIGPGLNLLQEDNPDLIGSEIARWLSTLEISG

SEQ ID NO: 2407 - protein, 277 aa, Synthetic construct
MFHYVDVGPRDGTPVLFLHGNPTSSYVWRNIIPHVAPTHRCIAPDLIGMGKSDKPDLGYFFDDHVRFMDAFIEALGLEEVVLVIHDWGSALGFHWAKRNPERVKGIAFMEFIRPIPTWDEWPEFARETFQAFRTTDVGRKLIIDQNVFIEGTLPMGVVRPLTEVEMDHYREPFLNPVDREPLWRFPNELPIAGEPANIVALVEEYDDWLHQSPVPKLLFWGTPGVLIPPAEAARLAKSLPNCKAVDIGPGLNLLQEDNPDLIGSEIARWLSTLEISG

SEQ ID NO: 2408 - protein, 277 aa, Synthetic construct
MFHYVDVGPRDGTPVLFLHGNPTSSYVWRNIIPHVAPTHRCIAPDLIGMGKSDKPDLGYFFDDHVRFMDAFIEALGLEEVVLVIHDWGSALGFHWAKRNPERVKGIAFMEFIRPIPTWDEWPEFARETFQAFRTTDVGRKLIIDQNVFIEGTLPMGVVRPLTEVEMDHYREPFLNPVDREPLWRFPNELPIAGEPANIVALVEEYEDWLHQSPVPKLLFWGTPGVLIPPAEAARLAKSLPNCKAVDIGPGLNLLQEDNPDLIGSEIARWLSTLEISG

SEQ ID NO: 2409 - protein, 277 aa, Synthetic construct
MFHYVDVGPRDGTPVLFLHGNPTSSYVWRNIIPHVAPTHRCIAPDLIGMGKSDKPDLGYFFDDHVRFMDAFIEALGLEEVVLVIHDWGSALGFHWAKRNPERVKGIAFMEFIRPIPTWDEWPEFARETFQAFRTTDVGRKLIIDQNVFIEGTLPMGVVRPLTEVEMDHYREPFLNPVDREPLWRFPNELPIAGEPANIVALVEEYRDWLHQSPVPKLLFWGTPGVLIPPAEAARLAKSLPNCKAVDIGPGLNLLQEDNPDLIGSEIARWLSTLEISG

SEQ ID NO: 2410 - protein, 277 aa, Synthetic construct
MFHYVDVGPRDGTPVLFLHGNPTSSYVWRNIIPHVAPTHRCIAPDLIGMGKSDKPDLGYFFDDHVRFMDAFIEALGLEEVVLVIHDWGSALGFHWAKRNPERVKGIAFMEFIRPIPTWDEWPEFARETFQAFRTTDVGRKLIIDQNVFIEGTLPMGVVRPLTEVEMDHYREPFLNPVDREPLWRFPNELPIAGEPANIVALVEEYMAWLHQSPVPKLLFWGTPGVLIPPAEAARLAKSLPNCKAVDIGPGLNLLQEDNPDLIGSEIARWLSTLEISG

SEQ ID NO: 2411 - protein, 277 aa, Synthetic construct
MFHYVDVGPRDGTPVLFLHGNPTSSYVWRNIIPHVAPTHRCIAPDLIGMGKSDKPDLGYFFDDHVRFMDAFIEALGLEEVVLVIHDWGSALGFHWAKRNPERVKGIAFMEFIRPIPTWDEWPEFARETFQAFRTTDVGRKLIIDQNVFIEGTLPMGVVRPLTEVEMDHYREPFLNPVDREPLWRFPNELPIAGEPANIVALVEEYMEWLHQSPVPKLLFWGTPGVLIPPAEAARLAKSLPNCKAVDIGPGLNLLQEDNPDLIGSEIARWLSTLEISG

SEQ ID NO: 2412 - protein, 277 aa, Synthetic construct
MFHYVDVGPRDGTPVLFLHGNPTSSYVWRNIIPHVAPTHRCIAPDLIGMGKSDKPDLGYFFDDHVRFMDAFIEALGLEEVVLVIHDWGSALGFHWAKRNPERVKGIAFMEFIRPIPTWDEWPEFARETFQAFRTTDVGRKLIIDQNVFIEGTLPMGVVRPLTEVEMDHYREPFLNPVDREPLWRFPNELPIAGEPANIVALVEEYMSWLHQSPVPKLLFWGTPGVLIPPAEAARLAKSLPNCKAVDIGPGLNLLQEDNPDLIGSEIARWLSTLEISG

SEQ ID NO: 2413 - protein, 277 aa, Synthetic construct
MFHYVDVGPRDGTPVLFLHGNPTSSYVWRNIIPHVAPTHRCIAPDLIGMGKSDKPDLGYFFDDHVRFMDAFIEALGLEEVVLVIHDWGSALGFHWAKRNPERVKGIAFMEFIRPIPTWDEWPEFARETFQAFRTTDVGRKLIIDQNVFIEGTLPMGVVRPLTEVEMDHYREPFLNPVDREPLWRFPNELPIAGEPANIVALVEEYMTWLHQSPVPKLLFWGTPGVLIPPAEAARLAKSLPNCKAVDIGPGLNLLQEDNPDLIGSEIARWLSTLEISG

SEQ ID NO: 2414 - protein, 277 aa, Synthetic construct
MFHYVDVGPRDGTPVLFLHGNPTSSYVWRNIIPHVAPTHRCIAPDLIGMGKSDKPDLGYFFDDHVRFMDAFIEALGLEEVVLVIHDWGSALGFHWAKRNPERVKGIAFMEFIRPIPTWDEWPEFARETFQAFRTTDVGRKLIIDQNVFIEGTLPMGVVRPLTEVEMDHYREPFLNPVDREPLWRFPNELPIAGEPANIVALVEEYMGWLHQSPVPKLLFWGTPGVLIPPAEAARLAKSLPNCKAVDIGPGLNLLQEDNPDLIGSEIARWLSTLEISG

SEQ ID NO: 2415 - protein, 277 aa, Synthetic construct
MFHYVDVGPRDGTPVLFLHGNPTSSYVWRNIIPHVAPTHRCIAPDLIGMGKSDKPDLGYFFDDHVRFMDAFIEALGLEEVVLVIHDWGSALGFHWAKRNPERVKGIAFMEFIRPIPTWDEWPEFARETFQAFRTTDVGRKLIIDQNVFIEGTLPMGVVRPLTEVEMDHYREPFLNPVDREPLWRFPNELPIAGEPANIVALVEEYMQWLHQSPVPKLLFWGTPGVLIPPAEAARLAKSLPNCKAVDIGPGLNLLQEDNPDLIGSEIARWLSTLEISG

SEQ ID NO: 2416 - protein, 277 aa, Synthetic construct
MFHYVDVGPRDGTPVLFLHGNPTSSYVWRNIIPHVAPTHRCIAPDLIGMGKSDKPDLGYFFDDHVRFMDAFIEALGLEEVVLVIHDWGSALGFHWAKRNPERVKGIAFMEFIRPIPTWDEWPEFARETFQAFRTTDVGRKLIIDQNVFIEGTLPMGVVRPLTEVEMDHYREPFLNPVDREPLWRFPNELPIAGEPANIVALVEEYMDFLHQSPVPKLLFWGTPGVLIPPAEAARLAKSLPNCKAVDIGPGLNLLQEDNPDLIGSEIARWLSTLEISG

SEQ ID NO: 2417 - protein, 277 aa, Synthetic construct
MFHYVDVGPRDGTPVLFLHGNPTSSYVWRNIIPHVAPTHRCIAPDLIGMGKSDKPDLGYFFDDHVRFMDAFIEALGLEEVVLVIHDWGSALGFHWAKRNPERVKGIAFMEFIRPIPTWDEWPEFARETFQAFRTTDVGRKLIIDQNVFIEGTLPMGVVRPLTEVEMDHYREPFLNPVDREPLWRFPNELPIAGEPANIVALVEEYMDYLHQSPVPKLLFWGTPGVLIPPAEAARLAKSLPNCKAVDIGPGLNLLQEDNPDLIGSEIARWLSTLEISG

SEQ ID NO: 2418 - protein, 277 aa, Synthetic construct
MFHYVDVGPRDGTPVLFLHGNPTSSYVWRNIIPHVAPTHRCIAPDLIGMGKSDKPDLGYFFDDHVRFMDAFIEALGLEEVVLVIHDWGSALGFHWAKRNPERVKGIAFMEFIRPIPTWDEWPEFARETFQAFRTTDVGRKLIIDQNVFIEGTLPMGVVRPLTEVEMDHYREPFLNPVDREPLWRFPNELPIAGEPANIVALVEEYMDLLHQSPVPKLLFWGTPGVLIPPAEAARLAKSLPNCKAVDIGPGLNLLQEDNPDLIGSEIARWLSTLEISG

SEQ ID NO: 2419 - protein, 277 aa, Synthetic construct
MFHYVDVGPRDGTPVLFLHGNPTSSYVWRNIIPHVAPTHRCIAPDLIGMGKSDKPDLGYFFDDHVRFMDAFIEALGLEEVVLVIHDWGSALGFHWAKRNPERVKGIAFMEFIRPIPTWDEWPEFARETFQAFRTTDVGRKLIIDQNVFIEGTLPMGVVRPLTEVEMDHYREPFLNPVDREPLWRFPNELPIAGEPANIVALVEEYMDHLHQSPVPKLLFWGTPGVLIPPAEAARLAKSLPNCKAVDIGPGLNLLQEDNPDLIGSEIARWLSTLEISG

SEQ ID NO: 2420 - protein, 277 aa, Synthetic construct
MFHYVDVGPRDGTPVLFLHGNPTSSYVWRNIIPHVAPTHRCIAPDLIGMGKSDKPDLGYFFDDHVRFMDAFIEALGLEEVVLVIHDWGSALGFHWAKRNPERVKGIAFMEFIRPIPTWDEWPEFARETFQAFRTTDVGRKLIIDQNVFIEGTLPMGVVRPLTEVEMDHYREPFLNPVDREPLWRFPNELPIAGEPANIVALVEEYMDRLHQSPVPKLLFWGTPGVLIPPAEAARLAKSLPNCKAVDIGPGLNLLQEDNPDLIGSEIARWLSTLEISG

SEQ ID NO: 2421 - protein, 277 aa, Synthetic construct
MFHYVDVGPRDGTPVLFLHGNPTSSYVWRNIIPHVAPTHRCIAPDLIGMGKSDKPDLGYFFDDHVRFMDAFIEALGLEEVVLVIHDWGSALGFHWAKRNPERVKGIAFMEFIRPIPTWDEWPEFARETFQAFRTTDVGRKLIIDQNVFIEGTLPMGVVRPLTEVEMDHYREPFLNPVDREPLWRFPNELPIAGEPANIVALVEEYMDALHQSPVPKLLFWGTPGVLIPPAEAARLAKSLPNCKAVDIGPGLNLLQEDNPDLIGSEIARWLSTLEISG

SEQ ID NO: 2422 - protein, 277 aa, Synthetic construct
MFHYVDVGPRDGTPVLFLHGNPTSSYVWRNIIPHVAPTHRCIAPDLIGMGKSDKPDLGYFFDDHVRFMDAFIEALGLEEVVLVIHDWGSALGFHWAKRNPERVKGIAFMEFIRPIPTWDEWPEFARETFQAFRTTDVGRKLIIDQNVFIEGTLPMGVVRPLTEVEMDHYREPFLNPVDREPLWRFPNELPIAGEPANIVALVEEYMDWMHQSPVPKLLFWGTPGVLIPPAEAARLAKSLPNCKAVDIGPGLNLLQEDNPDLIGSEIARWLSTLEISG

SEQ ID NO: 2423 - protein, 277 aa, Synthetic construct
MFHYVDVGPRDGTPVLFLHGNPTSSYVWRNIIPHVAPTHRCIAPDLIGMGKSDKPDLGYFFDDHVRFMDAFIEALGLEEVVLVIHDWGSALGFHWAKRNPERVKGIAFMEFIRPIPTWDEWPEFARETFQAFRTTDVGRKLIIDQNVFIEGTLPMGVVRPLTEVEMDHYREPFLNPVDREPLWRFPNELPIAGEPANIVALVEEYMDWIHQSPVPKLLFWGTPGVLIPPAEAARLAKSLPNCKAVDIGPGLNLLQEDNPDLIGSEIARWLSTLEISG

SEQ ID NO: 2424 - protein, 277 aa, Synthetic construct
MFHYVDVGPRDGTPVLFLHGNPTSSYVWRNIIPHVAPTHRCIAPDLIGMGKSDKPDLGYFFDDHVRFMDAFIEALGLEEVVLVIHDWGSALGFHWAKRNPERVKGIAFMEFIRPIPTWDEWPEFARETFQAFRTTDVGRKLIIDQNVFIEGTLPMGVVRPLTEVEMDHYREPFLNPVDREPLWRFPNELPIAGEPANIVALVEEYMDWFHQSPVPKLLFWGTPGVLIPPAEAARLAKSLPNCKAVDIGPGLNLLQEDNPDLIGSEIARWLSTLEISG

SEQ ID NO: 2425 - protein, 277 aa, Synthetic construct
MFHYVDVGPRDGTPVLFLHGNPTSSYVWRNIIPHVAPTHRCIAPDLIGMGKSDKPDLGYFFDDHVRFMDAFIEALGLEEVVLVIHDWGSALGFHWAKRNPERVKGIAFMEFIRPIPTWDEWPEFARETFQAFRTTDVGRKLIIDQNVFIEGTLPMGVVRPLTEVEMDHYREPFLNPVDREPLWRFPNELPIAGEPANIVALVEEYMDWVHQSPVPKLLFWGTPGVLIPPAEAARLAKSLPNCKAVDIGPGLNLLQEDNPDLIGSEIARWLSTLEISG

SEQ ID NO: 2426 - protein, 277 aa, Synthetic construct
MFHYVDVGPRDGTPVLFLHGNPTSSYVWRNIIPHVAPTHRCIAPDLIGMGKSDKPDLGYFFDDHVRFMDAFIEALGLEEVVLVIHDWGSALGFHWAKRNPERVKGIAFMEFIRPIPTWDEWPEFARETFQAFRTTDVGRKLIIDQNVFIEGTLPMGVVRPLTEVEMDHYREPFLNPVDREPLWRFPNELPIAGEPANIVALVEEYMDWAHQSPVPKLLFWGTPGVLIPPAEAARLAKSLPNCKAVDIGPGLNLLQEDNPDLIGSEIARWLSTLEISG

SEQ ID NO: 2427 - protein, 277 aa, Synthetic construct
MFHYVDVGPRDGTPVLFLHGNPTSSYVWRNIIPHVAPTHRCIAPDLIGMGKSDKPDLGYFFDDHVRFMDAFIEALGLEEVVLVIHDWGSALGFHWAKRNPERVKGIAFMEFIRPIPTWDEWPEFARETFQAFRTTDVGRKLIIDQNVFIEGTLPMGVVRPLTEVEMDHYREPFLNPVDREPLWRFPNELPIAGEPANIVALVEEYMDWTHQSPVPKLLFWGTPGVLIPPAEAARLAKSLPNCKAVDIGPGLNLLQEDNPDLIGSEIARWLSTLEISG

SEQ ID NO: 2428 - protein, 277 aa, Synthetic construct
MFHYVDVGPRDGTPVLFLHGNPTSSYVWRNIIPHVAPTHRCIAPDLIGMGKSDKPDLGYFFDDHVRFMDAFIEALGLEEVVLVIHDWGSALGFHWAKRNPERVKGIAFMEFIRPIPTWDEWPEFARETFQAFRTTDVGRKLIIDQNVFIEGTLPMGVVRPLTEVEMDHYREPFLNPVDREPLWRFPNELPIAGEPANIVALVEEYMDWLAQSPVPKLLFWGTPGVLIPPAEAARLAKSLPNCKAVDIGPGLNLLQEDNPDLIGSEIARWLSTLEISG

SEQ ID NO: 2429 - protein, 277 aa, Synthetic construct
MFHYVDVGPRDGTPVLFLHGNPTSSYVWRNIIPHVAPTHRCIAPDLIGMGKSDKPDLGYFFDDHVRFMDAFIEALGLEEVVLVIHDWGSALGFHWAKRNPERVKGIAFMEFIRPIPTWDEWPEFARETFQAFRTTDVGRKLIIDQNVFIEGTLPMGVVRPLTEVEMDHYREPFLNPVDREPLWRFPNELPIAGEPANIVALVEEYMDWLSQSPVPKLLFWGTPGVLIPPAEAARLAKSLPNCKAVDIGPGLNLLQEDNPDLIGSEIARWLSTLEISG

SEQ ID NO: 2430 - protein, 277 aa, Synthetic construct
MFHYVDVGPRDGTPVLFLHGNPTSSYVWRNIIPHVAPTHRCIAPDLIGMGKSDKPDLGYFFDDHVRFMDAFIEALGLEEVVLVIHDWGSALGFHWAKRNPERVKGIAFMEFIRPIPTWDEWPEFARETFQAFRTTDVGRKLIIDQNVFIEGTLPMGVVRPLTEVEMDHYREPFLNPVDREPLWRFPNELPIAGEPANIVALVEEYMDWLRQSPVPKLLFWGTPGVLIPPAEAARLAKSLPNCKAVDIGPGLNLLQEDNPDLIGSEIARWLSTLEISG

SEQ ID NO: 2431 - protein, 277 aa, Synthetic construct
MFHYVDVGPRDGTPVLFLHGNPTSSYVWRNIIPHVAPTHRCIAPDLIGMGKSDKPDLGYFFDDHVRFMDAFIEALGLEEVVLVIHDWGSALGFHWAKRNPERVKGIAFMEFIRPIPTWDEWPEFARETFQAFRTTDVGRKLIIDQNVFIEGTLPMGVVRPLTEVEMDHYREPFLNPVDREPLWRFPNELPIAGEPANIVALVEEYMDWLGQSPVPKLLFWGTPGVLIPPAEAARLAKSLPNCKAVDIGPGLNLLQEDNPDLIGSEIARWLSTLEISG

SEQ ID NO: 2432 - protein, 277 aa, Synthetic construct
MFHYVDVGPRDGTPVLFLHGNPTSSYVWRNIIPHVAPTHRCIAPDLIGMGKSDKPDLGYFFDDHVRFMDAFIEALGLEEVVLVIHDWGSALGFHWAKRNPERVKGIAFMEFIRPIPTWDEWPEFARETFQAFRTTDVGRKLIIDQNVFIEGTLPMGVVRPLTEVEMDHYREPFLNPVDREPLWRFPNELPIAGEPANIVALVEEYMDWLEQSPVPKLLFWGTPGVLIPPAEAARLAKSLPNCKAVDIGPGLNLLQEDNPDLIGSEIARWLSTLEISG

SEQ ID NO: 2433 - protein, 277 aa, Synthetic construct
MFHYVDVGPRDGTPVLFLHGNPTSSYVWRNIIPHVAPTHRCIAPDLIGMGKSDKPDLGYFFDDHVRFMDAFIEALGLEEVVLVIHDWGSALGFHWAKRNPERVKGIAFMEFIRPIPTWDEWPEFARETFQAFRTTDVGRKLIIDQNVFIEGTLPMGVVRPLTEVEMDHYREPFLNPVDREPLWRFPNELPIAGEPANIVALVEEYMDWLKQSPVPKLLFWGTPGVLIPPAEAARLAKSLPNCKAVDIGPGLNLLQEDNPDLIGSEIARWLSTLEISG

SEQ ID NO: 2434 - protein, 277 aa, Synthetic construct
MFHYVDVGPRDGTPVLFLHGNPTSSYVWRNIIPHVAPTHRCIAPDLIGMGKSDKPDLGYFFDDHVRFMDAFIEALGLEEVVLVIHDWGSALGFHWAKRNPERVKGIAFMEFIRPIPTWDEWPEFARETFQAFRTTDVGRKLIIDQNVFIEGTLPMGVVRPLTEVEMDHYREPFLNPVDREPLWRFPNELPIAGEPANIVALVEEYMDWLHTSPVPKLLFWGTPGVLIPPAEAARLAKSLPNCKAVDIGPGLNLLQEDNPDLIGSEIARWLSTLEISG

SEQ ID NO: 2435 - protein, 277 aa, Synthetic construct
MFHYVDVGPRDGTPVLFLHGNPTSSYVWRNIIPHVAPTHRCIAPDLIGMGKSDKPDLGYFFDDHVRFMDAFIEALGLEEVVLVIHDWGSALGFHWAKRNPERVKGIAFMEFIRPIPTWDEWPEFARETFQAFRTTDVGRKLIIDQNVFIEGTLPMGVVRPLTEVEMDHYREPFLNPVDREPLWRFPNELPIAGEPANIVALVEEYMDWLHASPVPKLLFWGTPGVLIPPAEAARLAKSLPNCKAVDIGPGLNLLQEDNPDLIGSEIARWLSTLEISG

SEQ ID NO: 2436 - protein, 277 aa, Synthetic construct
MFHYVDVGPRDGTPVLFLHGNPTSSYVWRNIIPHVAPTHRCIAPDLIGMGKSDKPDLGYFFDDHVRFMDAFIEALGLEEVVLVIHDWGSALGFHWAKRNPERVKGIAFMEFIRPIPTWDEWPEFARETFQAFRTTDVGRKLIIDQNVFIEGTLPMGVVRPLTEVEMDHYREPFLNPVDREPLWRFPNELPIAGEPANIVALVEEYMDWLHSSPVPKLLFWGTPGVLIPPAEAARLAKSLPNCKAVDIGPGLNLLQEDNPDLIGSEIARWLSTLEISG

SEQ ID NO: 2437 - protein, 277 aa, Synthetic construct
MFHYVDVGPRDGTPVLFLHGNPTSSYVWRNIIPHVAPTHRCIAPDLIGMGKSDKPDLGYFFDDHVRFMDAFIEALGLEEVVLVIHDWGSALGFHWAKRNPERVKGIAFMEFIRPIPTWDEWPEFARETFQAFRTTDVGRKLIIDQNVFIEGTLPMGVVRPLTEVEMDHYREPFLNPVDREPLWRFPNELPIAGEPANIVALVEEYMDWLHRSPVPKLLFWGTPGVLIPPAEAARLAKSLPNCKAVDIGPGLNLLQEDNPDLIGSEIARWLSTLEISG

SEQ ID NO: 2438 - protein, 277 aa, Synthetic construct
MFHYVDVGPRDGTPVLFLHGNPTSSYVWRNIIPHVAPTHRCIAPDLIGMGKSDKPDLGYFFDDHVRFMDAFIEALGLEEVVLVIHDWGSALGFHWAKRNPERVKGIAFMEFIRPIPTWDEWPEFARETFQAFRTTDVGRKLIIDQNVFIEGTLPMGVVRPLTEVEMDHYREPFLNPVDREPLWRFPNELPIAGEPANIVALVEEYMDWLHESPVPKLLFWGTPGVLIPPAEAARLAKSLPNCKAVDIGPGLNLLQEDNPDLIGSEIARWLSTLEISG

SEQ ID NO: 2439 - protein, 277 aa, Synthetic construct
MFHYVDVGPRDGTPVLFLHGNPTSSYVWRNIIPHVAPTHRCIAPDLIGMGKSDKPDLGYFFDDHVRFMDAFIEALGLEEVVLVIHDWGSALGFHWAKRNPERVKGIAFMEFIRPIPTWDEWPEFARETFQAFRTTDVGRKLIIDQNVFIEGTLPMGVVRPLTEVEMDHYREPFLNPVDREPLWRFPNELPIAGEPANIVALVEEYMDWLHKSPVPKLLFWGTPGVLIPPAEAARLAKSLPNCKAVDIGPGLNLLQEDNPDLIGSEIARWLSTLEISG

SEQ ID NO: 2440 - protein, 277 aa, Synthetic construct
MFHYVDVGPRDGTPVLFLHGNPTSSYVWRNIIPHVAPTHRCIAPDLIGMGKSDKPDLGYFFDDHVRFMDAFIEALGLEEVVLVIHDWGSALGFHWAKRNPERVKGIAFMEFIRPIPTWDEWPEFARETFQAFRTTDVGRKLIIDQNVFIEGTLPMGVVRPLTEVEMDHYREPFLNPVDREPLWRFPNELPIAGEPANIVALVEEYMDWLHQTPVPKLLFWGTPGVLIPPAEAARLAKSLPNCKAVDIGPGLNLLQEDNPDLIGSEIARWLSTLEISG

SEQ ID NO: 2441 - protein, 277 aa, Synthetic construct
MFHYVDVGPRDGTPVLFLHGNPTSSYVWRNIIPHVAPTHRCIAPDLIGMGKSDKPDLGYFFDDHVRFMDAFIEALGLEEVVLVIHDWGSALGFHWAKRNPERVKGIAFMEFIRPIPTWDEWPEFARETFQAFRTTDVGRKLIIDQNVFIEGTLPMGVVRPLTEVEMDHYREPFLNPVDREPLWRFPNELPIAGEPANIVALVEEYMDWLHQNPVPKLLFWGTPGVLIPPAEAARLAKSLPNCKAVDIGPGLNLLQEDNPDLIGSEIARWLSTLEISG

SEQ ID NO: 2442 - protein, 277 aa, Synthetic construct
MFHYVDVGPRDGTPVLFLHGNPTSSYVWRNIIPHVAPTHRCIAPDLIGMGKSDKPDLGYFFDDHVRFMDAFIEALGLEEVVLVIHDWGSALGFHWAKRNPERVKGIAFMEFIRPIPTWDEWPEFARETFQAFRTTDVGRKLIIDQNVFIEGTLPMGVVRPLTEVEMDHYREPFLNPVDREPLWRFPNELPIAGEPANIVALVEEYMDWLHQAPVPKLLFWGTPGVLIPPAEAARLAKSLPNCKAVDIGPGLNLLQEDNPDLIGSEIARWLSTLEISG

SEQ ID NO: 2443 - protein, 277 aa, Synthetic construct
MFHYVDVGPRDGTPVLFLHGNPTSSYVWRNIIPHVAPTHRCIAPDLIGMGKSDKPDLGYFFDDHVRFMDAFIEALGLEEVVLVIHDWGSALGFHWAKRNPERVKGIAFMEFIRPIPTWDEWPEFARETFQAFRTTDVGRKLIIDQNVFIEGTLPMGVVRPLTEVEMDHYREPFLNPVDREPLWRFPNELPIAGEPANIVALVEEYMDWLHQCPVPKLLFWGTPGVLIPPAEAARLAKSLPNCKAVDIGPGLNLLQEDNPDLIGSEIARWLSTLEISG

SEQ ID NO: 2444 - protein, 277 aa, Synthetic construct
MFHYVDVGPRDGTPVLFLHGNPTSSYVWRNIIPHVAPTHRCIAPDLIGMGKSDKPDLGYFFDDHVRFMDAFIEALGLEEVVLVIHDWGSALGFHWAKRNPERVKGIAFMEFIRPIPTWDEWPEFARETFQAFRTTDVGRKLIIDQNVFIEGTLPMGVVRPLTEVEMDHYREPFLNPVDREPLWRFPNELPIAGEPANIVALVEEYMDWLHQHPVPKLLFWGTPGVLIPPAEAARLAKSLPNCKAVDIGPGLNLLQEDNPDLIGSEIARWLSTLEISG

SEQ ID NO: 2445 - protein, 277 aa, Synthetic construct
MFHYVDVGPRDGTPVLFLHGNPTSSYVWRNIIPHVAPTHRCIAPDLIGMGKSDKPDLGYFFDDHVRFMDAFIEALGLEEVVLVIHDWGSALGFHWAKRNPERVKGIAFMEFIRPIPTWDEWPEFARETFQAFRTTDVGRKLIIDQNVFIEGTLPMGVVRPLTEVEMDHYREPFLNPVDREPLWRFPNELPIAGEPANIVALVEEYMDWLHQQPVPKLLFWGTPGVLIPPAEAARLAKSLPNCKAVDIGPGLNLLQEDNPDLIGSEIARWLSTLEISG

SEQ ID NO: 2446 - protein, 277 aa, Synthetic construct
MFHYVDVGPRDGTPVLFLHGNPTSSYVWRNIIPHVAPTHRCIAPDLIGMGKSDKPDLGYFFDDHVRFMDAFIEALGLEEVVLVIHDWGSALGFHWAKRNPERVKGIAFMEFIRPIPTWDEWPEFARETFQAFRTTDVGRKLIIDQNVFIEGTLPMGVVRPLTEVEMDHYREPFLNPVDREPLWRFPNELPIAGEPANIVALVEEYMDWLHQSDVPKLLFWGTPGVLIPPAEAARLAKSLPNCKAVDIGPGLNLLQEDNPDLIGSEIARWLSTLEISG

SEQ ID NO: 2447 - protein, 277 aa, Synthetic construct
MFHYVDVGPRDGTPVLFLHGNPTSSYVWRNIIPHVAPTHRCIAPDLIGMGKSDKPDLGYFFDDHVRFMDAFIEALGLEEVVLVIHDWGSALGFHWAKRNPERVKGIAFMEFIRPIPTWDEWPEFARETFQAFRTTDVGRKLIIDQNVFIEGTLPMGVVRPLTEVEMDHYREPFLNPVDREPLWRFPNELPIAGEPANIVALVEEYMDWLHQSEVPKLLFWGTPGVLIPPAEAARLAKSLPNCKAVDIGPGLNLLQEDNPDLIGSEIARWLSTLEISG

SEQ ID NO: 2448 - protein, 277 aa, Synthetic construct
MFHYVDVGPRDGTPVLFLHGNPTSSYVWRNIIPHVAPTHRCIAPDLIGMGKSDKPDLGYFFDDHVRFMDAFIEALGLEEVVLVIHDWGSALGFHWAKRNPERVKGIAFMEFIRPIPTWDEWPEFARETFQAFRTTDVGRKLIIDQNVFIEGTLPMGVVRPLTEVEMDHYREPFLNPVDREPLWRFPNELPIAGEPANIVALVEEYMDWLHQSTVPKLLFWGTPGVLIPPAEAARLAKSLPNCKAVDIGPGLNLLQEDNPDLIGSEIARWLSTLEISG

SEQ ID NO: 2449 - protein, 277 aa, Synthetic construct
MFHYVDVGPRDGTPVLFLHGNPTSSYVWRNIIPHVAPTHRCIAPDLIGMGKSDKPDLGYFFDDHVRFMDAFIEALGLEEVVLVIHDWGSALGFHWAKRNPERVKGIAFMEFIRPIPTWDEWPEFARETFQAFRTTDVGRKLIIDQNVFIEGTLPMGVVRPLTEVEMDHYREPFLNPVDREPLWRFPNELPIAGEPANIVALVEEYMDWLHQSSVPKLLFWGTPGVLIPPAEAARLAKSLPNCKAVDIGPGLNLLQEDNPDLIGSEIARWLSTLEISG

SEQ ID NO: 2450 - protein, 277 aa, Synthetic construct
MFHYVDVGPRDGTPVLFLHGNPTSSYVWRNIIPHVAPTHRCIAPDLIGMGKSDKPDLGYFFDDHVRFMDAFIEALGLEEVVLVIHDWGSALGFHWAKRNPERVKGIAFMEFIRPIPTWDEWPEFARETFQAFRTTDVGRKLIIDQNVFIEGTLPMGVVRPLTEVEMDHYREPFLNPVDREPLWRFPNELPIAGEPANIVALVEEYMDWLHQSQVPKLLFWGTPGVLIPPAEAARLAKSLPNCKAVDIGPGLNLLQEDNPDLIGSEIARWLSTLEISG

SEQ ID NO: 2451 - protein, 277 aa, Synthetic construct
MFHYVDVGPRDGTPVLFLHGNPTSSYVWRNIIPHVAPTHRCIAPDLIGMGKSDKPDLGYFFDDHVRFMDAFIEALGLEEVVLVIHDWGSALGFHWAKRNPERVKGIAFMEFIRPIPTWDEWPEFARETFQAFRTTDVGRKLIIDQNVFIEGTLPMGVVRPLTEVEMDHYREPFLNPVDREPLWRFPNELPIAGEPANIVALVEEYMDWLHQSAVPKLLFWGTPGVLIPPAEAARLAKSLPNCKAVDIGPGLNLLQEDNPDLIGSEIARWLSTLEISG

SEQ ID NO: 2452 - protein, 277 aa, Synthetic construct
MFHYVDVGPRDGTPVLFLHGNPTSSYVWRNIIPHVAPTHRCIAPDLIGMGKSDKPDLGYFFDDHVRFMDAFIEALGLEEVVLVIHDWGSALGFHWAKRNPERVKGIAFMEFIRPIPTWDEWPEFARETFQAFRTTDVGRKLIIDQNVFIEGTLPMGVVRPLTEVEMDHYREPFLNPVDREPLWRFPNELPIAGEPANIVALVEEYMDWLHQSPLPKLLFWGTPGVLIPPAEAARLAKSLPNCKAVDIGPGLNLLQEDNPDLIGSEIARWLSTLEISG

SEQ ID NO: 2453 - protein, 277 aa, Synthetic construct
MFHYVDVGPRDGTPVLFLHGNPTSSYVWRNIIPHVAPTHRCIAPDLIGMGKSDKPDLGYFFDDHVRFMDAFIEALGLEEVVLVIHDWGSALGFHWAKRNPERVKGIAFMEFIRPIPTWDEWPEFARETFQAFRTTDVGRKLIIDQNVFIEGTLPMGVVRPLTEVEMDHYREPFLNPVDREPLWRFPNELPIAGEPANIVALVEEYMDWLHQSPIPKLLFWGTPGVLIPPAEAARLAKSLPNCKAVDIGPGLNLLQEDNPDLIGSEIARWLSTLEISG

SEQ ID NO: 2454 - protein, 277 aa, Synthetic construct
MFHYVDVGPRDGTPVLFLHGNPTSSYVWRNIIPHVAPTHRCIAPDLIGMGKSDKPDLGYFFDDHVRFMDAFIEALGLEEVVLVIHDWGSALGFHWAKRNPERVKGIAFMEFIRPIPTWDEWPEFARETFQAFRTTDVGRKLIIDQNVFIEGTLPMGVVRPLTEVEMDHYREPFLNPVDREPLWRFPNELPIAGEPANIVALVEEYMDWLHQSPFPKLLFWGTPGVLIPPAEAARLAKSLPNCKAVDIGPGLNLLQEDNPDLIGSEIARWLSTLEISG

SEQ ID NO: 2455 - protein, 277 aa, Synthetic construct
MFHYVDVGPRDGTPVLFLHGNPTSSYVWRNIIPHVAPTHRCIAPDLIGMGKSDKPDLGYFFDDHVRFMDAFIEALGLEEVVLVIHDWGSALGFHWAKRNPERVKGIAFMEFIRPIPTWDEWPEFARETFQAFRTTDVGRKLIIDQNVFIEGTLPMGVVRPLTEVEMDHYREPFLNPVDREPLWRFPNELPIAGEPANIVALVEEYMDWLHQSPHPKLLFWGTPGVLIPPAEAARLAKSLPNCKAVDIGPGLNLLQEDNPDLIGSEIARWLSTLEISG

SEQ ID NO: 2456 - protein, 277 aa, Synthetic construct
MFHYVDVGPRDGTPVLFLHGNPTSSYVWRNIIPHVAPTHRCIAPDLIGMGKSDKPDLGYFFDDHVRFMDAFIEALGLEEVVLVIHDWGSALGFHWAKRNPERVKGIAFMEFIRPIPTWDEWPEFARETFQAFRTTDVGRKLIIDQNVFIEGTLPMGVVRPLTEVEMDHYREPFLNPVDREPLWRFPNELPIAGEPANIVALVEEYMDWLHQSPAPKLLFWGTPGVLIPPAEAARLAKSLPNCKAVDIGPGLNLLQEDNPDLIGSEIARWLSTLEISG

SEQ ID NO: 2457 - protein, 277 aa, Synthetic construct
MFHYVDVGPRDGTPVLFLHGNPTSSYVWRNIIPHVAPTHRCIAPDLIGMGKSDKPDLGYFFDDHVRFMDAFIEALGLEEVVLVIHDWGSALGFHWAKRNPERVKGIAFMEFIRPIPTWDEWPEFARETFQAFRTTDVGRKLIIDQNVFIEGTLPMGVVRPLTEVEMDHYREPFLNPVDREPLWRFPNELPIAGEPANIVALVEEYMDWLHQSPTPKLLFWGTPGVLIPPAEAARLAKSLPNCKAVDIGPGLNLLQEDNPDLIGSEIARWLSTLEISG

SEQ ID NO: 2458 - protein, 277 aa, Synthetic construct
MFHYVDVGPRDGTPVLFLHGNPTSSYVWRNIIPHVAPTHRCIAPDLIGMGKSDKPDLGYFFDDHVRFMDAFIEALGLEEVVLVIHDWGSALGFHWAKRNPERVKGIAFMEFIRPIPTWDEWPEFARETFQAFRTTDVGRKLIIDQNVFIEGTLPMGVVRPLTEVEMDHYREPFLNPVDREPLWRFPNELPIAGEPANIVALVEEYMDWLHQSPVAKLLFWGTPGVLIPPAEAARLAKSLPNCKAVDIGPGLNLLQEDNPDLIGSEIARWLSTLEISG

SEQ ID NO: 2459 - protein, 277 aa, Synthetic construct
MFHYVDVGPRDGTPVLFLHGNPTSSYVWRNIIPHVAPTHRCIAPDLIGMGKSDKPDLGYFFDDHVRFMDAFIEALGLEEVVLVIHDWGSALGFHWAKRNPERVKGIAFMEFIRPIPTWDEWPEFARETFQAFRTTDVGRKLIIDQNVFIEGTLPMGVVRPLTEVEMDHYREPFLNPVDREPLWRFPNELPIAGEPANIVALVEEYMDWLHQSPVEKLLFWGTPGVLIPPAEAARLAKSLPNCKAVDIGPGLNLLQEDNPDLIGSEIARWLSTLEISG

SEQ ID NO: 2460 - protein, 277 aa, Synthetic construct
MFHYVDVGPRDGTPVLFLHGNPTSSYVWRNIIPHVAPTHRCIAPDLIGMGKSDKPDLGYFFDDHVRFMDAFIEALGLEEVVLVIHDWGSALGFHWAKRNPERVKGIAFMEFIRPIPTWDEWPEFARETFQAFRTTDVGRKLIIDQNVFIEGTLPMGVVRPLTEVEMDHYREPFLNPVDREPLWRFPNELPIAGEPANIVALVEEYMDWLHQSPVSKLLFWGTPGVLIPPAEAARLAKSLPNCKAVDIGPGLNLLQEDNPDLIGSEIARWLSTLEISG

SEQ ID NO: 2461 - protein, 277 aa, Synthetic construct
MFHYVDVGPRDGTPVLFLHGNPTSSYVWRNIIPHVAPTHRCIAPDLIGMGKSDKPDLGYFFDDHVRFMDAFIEALGLEEVVLVIHDWGSALGFHWAKRNPERVKGIAFMEFIRPIPTWDEWPEFARETFQAFRTTDVGRKLIIDQNVFIEGTLPMGVVRPLTEVEMDHYREPFLNPVDREPLWRFPNELPIAGEPANIVALVEEYMDWLHQSPVDKLLFWGTPGVLIPPAEAARLAKSLPNCKAVDIGPGLNLLQEDNPDLIGSEIARWLSTLEISG

SEQ ID NO: 2462 - protein, 277 aa, Synthetic construct
MFHYVDVGPRDGTPVLFLHGNPTSSYVWRNIIPHVAPTHRCIAPDLIGMGKSDKPDLGYFFDDHVRFMDAFIEALGLEEVVLVIHDWGSALGFHWAKRNPERVKGIAFMEFIRPIPTWDEWPEFARETFQAFRTTDVGRKLIIDQNVFIEGTLPMGVVRPLTEVEMDHYREPFLNPVDREPLWRFPNELPIAGEPANIVALVEEYMDWLHQSPVQKLLFWGTPGVLIPPAEAARLAKSLPNCKAVDIGPGLNLLQEDNPDLIGSEIARWLSTLEISG

SEQ ID NO: 2463 - protein, 277 aa, Synthetic construct
MFHYVDVGPRDGTPVLFLHGNPTSSYVWRNIIPHVAPTHRCIAPDLIGMGKSDKPDLGYFFDDHVRFMDAFIEALGLEEVVLVIHDWGSALGFHWAKRNPERVKGIAFMEFIRPIPTWDEWPEFARETFQAFRTTDVGRKLIIDQNVFIEGTLPMGVVRPLTEVEMDHYREPFLNPVDREPLWRFPNELPIAGEPANIVALVEEYMDWLHQSPVRKLLFWGTPGVLIPPAEAARLAKSLPNCKAVDIGPGLNLLQEDNPDLIGSEIARWLSTLEISG

SEQ ID NO: 2464 - protein, 277 aa, Synthetic construct
MFHYVDVGPRDGTPVLFLHGNPTSSYVWRNIIPHVAPTHRCIAPDLIGMGKSDKPDLGYFFDDHVRFMDAFIEALGLEEVVLVIHDWGSALGFHWAKRNPERVKGIAFMEFIRPIPTWDEWPEFARETFQAFRTTDVGRKLIIDQNVFIEGTLPMGVVRPLTEVEMDHYREPFLNPVDREPLWRFPNELPIAGEPANIVALVEEYMDWLHQSPVPRLLFWGTPGVLIPPAEAARLAKSLPNCKAVDIGPGLNLLQEDNPDLIGSEIARWLSTLEISG

SEQ ID NO: 2465 - protein, 277 aa, Synthetic construct
MFHYVDVGPRDGTPVLFLHGNPTSSYVWRNIIPHVAPTHRCIAPDLIGMGKSDKPDLGYFFDDHVRFMDAFIEALGLEEVVLVIHDWGSALGFHWAKRNPERVKGIAFMEFIRPIPTWDEWPEFARETFQAFRTTDVGRKLIIDQNVFIEGTLPMGVVRPLTEVEMDHYREPFLNPVDREPLWRFPNELPIAGEPANIVALVEEYMDWLHQSPVPTLLFWGTPGVLIPPAEAARLAKSLPNCKAVDIGPGLNLLQEDNPDLIGSEIARWLSTLEISG

SEQ ID NO: 2466 - protein, 277 aa, Synthetic construct
MFHYVDVGPRDGTPVLFLHGNPTSSYVWRNIIPHVAPTHRCIAPDLIGMGKSDKPDLGYFFDDHVRFMDAFIEALGLEEVVLVIHDWGSALGFHWAKRNPERVKGIAFMEFIRPIPTWDEWPEFARETFQAFRTTDVGRKLIIDQNVFIEGTLPMGVVRPLTEVEMDHYREPFLNPVDREPLWRFPNELPIAGEPANIVALVEEYMDWLHQSPVPALLFWGTPGVLIPPAEAARLAKSLPNCKAVDIGPGLNLLQEDNPDLIGSEIARWLSTLEISG

SEQ ID NO: 2467 - protein, 277 aa, Synthetic construct
MFHYVDVGPRDGTPVLFLHGNPTSSYVWRNIIPHVAPTHRCIAPDLIGMGKSDKPDLGYFFDDHVRFMDAFIEALGLEEVVLVIHDWGSALGFHWAKRNPERVKGIAFMEFIRPIPTWDEWPEFARETFQAFRTTDVGRKLIIDQNVFIEGTLPMGVVRPLTEVEMDHYREPFLNPVDREPLWRFPNELPIAGEPANIVALVEEYMDWLHQSPVPQLLFWGTPGVLIPPAEAARLAKSLPNCKAVDIGPGLNLLQEDNPDLIGSEIARWLSTLEISG

SEQ ID NO: 2468 - protein, 277 aa, Synthetic construct
MFHYVDVGPRDGTPVLFLHGNPTSSYVWRNIIPHVAPTHRCIAPDLIGMGKSDKPDLGYFFDDHVRFMDAFIEALGLEEVVLVIHDWGSALGFHWAKRNPERVKGIAFMEFIRPIPTWDEWPEFARETFQAFRTTDVGRKLIIDQNVFIEGTLPMGVVRPLTEVEMDHYREPFLNPVDREPLWRFPNELPIAGEPANIVALVEEYMDWLHQSPVPMLLFWGTPGVLIPPAEAARLAKSLPNCKAVDIGPGLNLLQEDNPDLIGSEIARWLSTLEISG

SEQ ID NO: 2469 - protein, 277 aa, Synthetic construct
MFHYVDVGPRDGTPVLFLHGNPTSSYVWRNIIPHVAPTHRCIAPDLIGMGKSDKPDLGYFFDDHVRFMDAFIEALGLEEVVLVIHDWGSALGFHWAKRNPERVKGIAFMEFIRPIPTWDEWPEFARETFQAFRTTDVGRKLIIDQNVFIEGTLPMGVVRPLTEVEMDHYREPFLNPVDREPLWRFPNELPIAGEPANIVALVEEYMDWLHQSPVPSLLFWGTPGVLIPPAEAARLAKSLPNCKAVDIGPGLNLLQEDNPDLIGSEIARWLSTLEISG

SEQ ID NO: 2470 - protein, 277 aa, Synthetic construct
MFHYVDVGPRDGTPVLFLHGNPTSSYVWRNIIPHVAPTHRCIAPDLIGMGKSDKPDLGYFFDDHVRFMDAFIEALGLEEVVLVIHDWGSALGFHWAKRNPERVKGIAFMEFIRPIPTWDEWPEFARETFQAFRTTDVGRKLIIDQNVFIEGTLPMGVVRPLTEVEMDHYREPFLNPVDREPLWRFPNELPIAGEPANIVALVEEYMDWLHQSPVPKMLFWGTPGVLIPPAEAARLAKSLPNCKAVDIGPGLNLLQEDNPDLIGSEIARWLSTLEISG

SEQ ID NO: 2471 - protein, 277 aa, Synthetic construct
MFHYVDVGPRDGTPVLFLHGNPTSSYVWRNIIPHVAPTHRCIAPDLIGMGKSDKPDLGYFFDDHVRFMDAFIEALGLEEVVLVIHDWGSALGFHWAKRNPERVKGIAFMEFIRPIPTWDEWPEFARETFQAFRTTDVGRKLIIDQNVFIEGTLPMGVVRPLTEVEMDHYREPFLNPVDREPLWRFPNELPIAGEPANIVALVEEYMDWLHQSPVPKILFWGTPGVLIPPAEAARLAKSLPNCKAVDIGPGLNLLQEDNPDLIGSEIARWLSTLEISG

SEQ ID NO: 2472 - protein, 277 aa, Synthetic construct
MFHYVDVGPRDGTPVLFLHGNPTSSYVWRNIIPHVAPTHRCIAPDLIGMGKSDKPDLGYFFDDHVRFMDAFIEALGLEEVVLVIHDWGSALGFHWAKRNPERVKGIAFMEFIRPIPTWDEWPEFARETFQAFRTTDVGRKLIIDQNVFIEGTLPMGVVRPLTEVEMDHYREPFLNPVDREPLWRFPNELPIAGEPANIVALVEEYMDWLHQSPVPKFLFWGTPGVLIPPAEAARLAKSLPNCKAVDIGPGLNLLQEDNPDLIGSEIARWLSTLEISG

SEQ ID NO: 2473 - protein, 277 aa, Synthetic construct
MFHYVDVGPRDGTPVLFLHGNPTSSYVWRNIIPHVAPTHRCIAPDLIGMGKSDKPDLGYFFDDHVRFMDAFIEALGLEEVVLVIHDWGSALGFHWAKRNPERVKGIAFMEFIRPIPTWDEWPEFARETFQAFRTTDVGRKLIIDQNVFIEGTLPMGVVRPLTEVEMDHYREPFLNPVDREPLWRFPNELPIAGEPANIVALVEEYMDWLHQSPVPKVLFWGTPGVLIPPAEAARLAKSLPNCKAVDIGPGLNLLQEDNPDLIGSEIARWLSTLEISG

SEQ ID NO: 2474 - protein, 277 aa, Synthetic construct
MFHYVDVGPRDGTPVLFLHGNPTSSYVWRNIIPHVAPTHRCIAPDLIGMGKSDKPDLGYFFDDHVRFMDAFIEALGLEEVVLVIHDWGSALGFHWAKRNPERVKGIAFMEFIRPIPTWDEWPEFARETFQAFRTTDVGRKLIIDQNVFIEGTLPMGVVRPLTEVEMDHYREPFLNPVDREPLWRFPNELPIAGEPANIVALVEEYMDWLHQSPVPKALFWGTPGVLIPPAEAARLAKSLPNCKAVDIGPGLNLLQEDNPDLIGSEIARWLSTLEISG

SEQ ID NO: 2475 - protein, 277 aa, Synthetic construct
MFHYVDVGPRDGTPVLFLHGNPTSSYVWRNIIPHVAPTHRCIAPDLIGMGKSDKPDLGYFFDDHVRFMDAFIEALGLEEVVLVIHDWGSALGFHWAKRNPERVKGIAFMEFIRPIPTWDEWPEFARETFQAFRTTDVGRKLIIDQNVFIEGTLPMGVVRPLTEVEMDHYREPFLNPVDREPLWRFPNELPIAGEPANIVALVEEYMDWLHQSPVPKQLFWGTPGVLIPPAEAARLAKSLPNCKAVDIGPGLNLLQEDNPDLIGSEIARWLSTLEISG

SEQ ID NO: 2476 - protein, 277 aa, Synthetic construct
MFHYVDVGPRDGTPVLFLHGNPTSSYVWRNIIPHVAPTHRCIAPDLIGMGKSDKPDLGYFFDDHVRFMDAFIEALGLEEVVLVIHDWGSALGFHWAKRNPERVKGIAFMEFIRPIPTWDEWPEFARETFQAFRTTDVGRKLIIDQNVFIEGTLPMGVVRPLTEVEMDHYREPFLNPVDREPLWRFPNELPIAGEPANIVALVEEYMDWLHQSPVPKLIFWGTPGVLIPPAEAARLAKSLPNCKAVDIGPGLNLLQEDNPDLIGSEIARWLSTLEISG

SEQ ID NO: 2477 - protein, 277 aa, Synthetic construct
MFHYVDVGPRDGTPVLFLHGNPTSSYVWRNIIPHVAPTHRCIAPDLIGMGKSDKPDLGYFFDDHVRFMDAFIEALGLEEVVLVIHDWGSALGFHWAKRNPERVKGIAFMEFIRPIPTWDEWPEFARETFQAFRTTDVGRKLIIDQNVFIEGTLPMGVVRPLTEVEMDHYREPFLNPVDREPLWRFPNELPIAGEPANIVALVEEYMDWLHQSPVPKLFFWGTPGVLIPPAEAARLAKSLPNCKAVDIGPGLNLLQEDNPDLIGSEIARWLSTLEISG

SEQ ID NO: 2478 - protein, 277 aa, Synthetic construct
MFHYVDVGPRDGTPVLFLHGNPTSSYVWRNIIPHVAPTHRCIAPDLIGMGKSDKPDLGYFFDDHVRFMDAFIEALGLEEVVLVIHDWGSALGFHWAKRNPERVKGIAFMEFIRPIPTWDEWPEFARETFQAFRTTDVGRKLIIDQNVFIEGTLPMGVVRPLTEVEMDHYREPFLNPVDREPLWRFPNELPIAGEPANIVALVEEYMDWLHQSPVPKLVFWGTPGVLIPPAEAARLAKSLPNCKAVDIGPGLNLLQEDNPDLIGSEIARWLSTLEISG

SEQ ID NO: 2479 - protein, 277 aa, Synthetic construct
MFHYVDVGPRDGTPVLFLHGNPTSSYVWRNIIPHVAPTHRCIAPDLIGMGKSDKPDLGYFFDDHVRFMDAFIEALGLEEVVLVIHDWGSALGFHWAKRNPERVKGIAFMEFIRPIPTWDEWPEFARETFQAFRTTDVGRKLIIDQNVFIEGTLPMGVVRPLTEVEMDHYREPFLNPVDREPLWRFPNELPIAGEPANIVALVEEYMDWLHQSPVPKLMFWGTPGVLIPPAEAARLAKSLPNCKAVDIGPGLNLLQEDNPDLIGSEIARWLSTLEISG

SEQ ID NO: 2480 - protein, 277 aa, Synthetic construct
MFHYVDVGPRDGTPVLFLHGNPTSSYVWRNIIPHVAPTHRCIAPDLIGMGKSDKPDLGYFFDDHVRFMDAFIEALGLEEVVLVIHDWGSALGFHWAKRNPERVKGIAFMEFIRPIPTWDEWPEFARETFQAFRTTDVGRKLIIDQNVFIEGTLPMGVVRPLTEVEMDHYREPFLNPVDREPLWRFPNELPIAGEPANIVALVEEYMDWLHQSPVPKLAFWGTPGVLIPPAEAARLAKSLPNCKAVDIGPGLNLLQEDNPDLIGSEIARWLSTLEISG

SEQ ID NO: 2481 - protein, 277 aa, Synthetic construct
MFHYVDVGPRDGTPVLFLHGNPTSSYVWRNIIPHVAPTHRCIAPDLIGMGKSDKPDLGYFFDDHVRFMDAFIEALGLEEVVLVIHDWGSALGFHWAKRNPERVKGIAFMEFIRPIPTWDEWPEFARETFQAFRTTDVGRKLIIDQNVFIEGTLPMGVVRPLTEVEMDHYREPFLNPVDREPLWRFPNELPIAGEPANIVALVEEYMDWLHQSPVPKLYFWGTPGVLIPPAEAARLAKSLPNCKAVDIGPGLNLLQEDNPDLIGSEIARWLSTLEISG

SEQ ID NO: 2482 - protein, 277 aa, Synthetic construct
MFHYVDVGPRDGTPVLFLHGNPTSSYVWRNIIPHVAPTHRCIAPDLIGMGKSDKPDLGYFFDDHVRFMDAFIEALGLEEVVLVIHDWGSALGFHWAKRNPERVKGIAFMEFIRPIPTWDEWPEFARETFQAFRTTDVGRKLIIDQNVFIEGTLPMGVVRPLTEVEMDHYREPFLNPVDREPLWRFPNELPIAGEPANIVALVEEYMDWLHQSPVPKLLLWGTPGVLIPPAEAARLAKSLPNCKAVDIGPGLNLLQEDNPDLIGSEIARWLSTLEISG

SEQ ID NO: 2483 - protein, 277 aa, Synthetic construct
MFHYVDVGPRDGTPVLFLHGNPTSSYVWRNIIPHVAPTHRCIAPDLIGMGKSDKPDLGYFFDDHVRFMDAFIEALGLEEVVLVIHDWGSALGFHWAKRNPERVKGIAFMEFIRPIPTWDEWPEFARETFQAFRTTDVGRKLIIDQNVFIEGTLPMGVVRPLTEVEMDHYREPFLNPVDREPLWRFPNELPIAGEPANIVALVEEYMDWLHQSPVPKLLVWGTPGVLIPPAEAARLAKSLPNCKAVDIGPGLNLLQEDNPDLIGSEIARWLSTLEISG

SEQ ID NO: 2484 - protein, 277 aa, Synthetic construct
MFHYVDVGPRDGTPVLFLHGNPTSSYVWRNIIPHVAPTHRCIAPDLIGMGKSDKPDLGYFFDDHVRFMDAFIEALGLEEVVLVIHDWGSALGFHWAKRNPERVKGIAFMEFIRPIPTWDEWPEFARETFQAFRTTDVGRKLIIDQNVFIEGTLPMGVVRPLTEVEMDHYREPFLNPVDREPLWRFPNELPIAGEPANIVALVEEYMDWLHQSPVPKLLIWGTPGVLIPPAEAARLAKSLPNCKAVDIGPGLNLLQEDNPDLIGSEIARWLSTLEISG

SEQ ID NO: 2485 - protein, 277 aa, Synthetic construct
MFHYVDVGPRDGTPVLFLHGNPTSSYVWRNIIPHVAPTHRCIAPDLIGMGKSDKPDLGYFFDDHVRFMDAFIEALGLEEVVLVIHDWGSALGFHWAKRNPERVKGIAFMEFIRPIPTWDEWPEFARETFQAFRTTDVGRKLIIDQNVFIEGTLPMGVVRPLTEVEMDHYREPFLNPVDREPLWRFPNELPIAGEPANIVALVEEYMDWLHQSPVPKLLMWGTPGVLIPPAEAARLAKSLPNCKAVDIGPGLNLLQEDNPDLIGSEIARWLSTLEISG

SEQ ID NO: 2486 - protein, 277 aa, Synthetic construct
MFHYVDVGPRDGTPVLFLHGNPTSSYVWRNIIPHVAPTHRCIAPDLIGMGKSDKPDLGYFFDDHVRFMDAFIEALGLEEVVLVIHDWGSALGFHWAKRNPERVKGIAFMEFIRPIPTWDEWPEFARETFQAFRTTDVGRKLIIDQNVFIEGTLPMGVVRPLTEVEMDHYREPFLNPVDREPLWRFPNELPIAGEPANIVALVEEYMDWLHQSPVPKLLAWGTPGVLIPPAEAARLAKSLPNCKAVDIGPGLNLLQEDNPDLIGSEIARWLSTLEISG

SEQ ID NO: 2487 - protein, 277 aa, Synthetic construct
MFHYVDVGPRDGTPVLFLHGNPTSSYVWRNIIPHVAPTHRCIAPDLIGMGKSDKPDLGYFFDDHVRFMDAFIEALGLEEVVLVIHDWGSALGFHWAKRNPERVKGIAFMEFIRPIPTWDEWPEFARETFQAFRTTDVGRKLIIDQNVFIEGTLPMGVVRPLTEVEMDHYREPFLNPVDREPLWRFPNELPIAGEPANIVALVEEYMDWLHQSPVPKLLCWGTPGVLIPPAEAARLAKSLPNCKAVDIGPGLNLLQEDNPDLIGSEIARWLSTLEISG

SEQ ID NO: 2488 - protein, 277 aa, Synthetic construct
MFHYVDVGPRDGTPVLFLHGNPTSSYVWRNIIPHVAPTHRCIAPDLIGMGKSDKPDLGYFFDDHVRFMDAFIEALGLEEVVLVIHDWGSALGFHWAKRNPERVKGIAFMEFIRPIPTWDEWPEFARETFQAFRTTDVGRKLIIDQNVFIEGTLPMGVVRPLTEVEMDHYREPFLNPVDREPLWRFPNELPIAGEPANIVALVEEYMDWLHQSPVPKLLFRGTPGVLIPPAEAARLAKSLPNCKAVDIGPGLNLLQEDNPDLIGSEIARWLSTLEISG

SEQ ID NO: 2489 - protein, 277 aa, Synthetic construct
MFHYVDVGPRDGTPVLFLHGNPTSSYVWRNIIPHVAPTHRCIAPDLIGMGKSDKPDLGYFFDDHVRFMDAFIEALGLEEVVLVIHDWGSALGFHWAKRNPERVKGIAFMEFIRPIPTWDEWPEFARETFQAFRTTDVGRKLIIDQNVFIEGTLPMGVVRPLTEVEMDHYREPFLNPVDREPLWRFPNELPIAGEPANIVALVEEYMDWLHQSPVPKLLFYGTPGVLIPPAEAARLAKSLPNCKAVDIGPGLNLLQEDNPDLIGSEIARWLSTLEISG

SEQ ID NO: 2490 - protein, 277 aa, Synthetic construct
MFHYVDVGPRDGTPVLFLHGNPTSSYVWRNIIPHVAPTHRCIAPDLIGMGKSDKPDLGYFFDDHVRFMDAFIEALGLEEVVLVIHDWGSALGFHWAKRNPERVKGIAFMEFIRPIPTWDEWPEFARETFQAFRTTDVGRKLIIDQNVFIEGTLPMGVVRPLTEVEMDHYREPFLNPVDREPLWRFPNELPIAGEPANIVALVEEYMDWLHQSPVPKLLFTGTPGVLIPPAEAARLAKSLPNCKAVDIGPGLNLLQEDNPDLIGSEIARWLSTLEISG

SEQ ID NO: 2491 - protein, 277 aa, Synthetic construct
MFHYVDVGPRDGTPVLFLHGNPTSSYVWRNIIPHVAPTHRCIAPDLIGMGKSDKPDLGYFFDDHVRFMDAFIEALGLEEVVLVIHDWGSALGFHWAKRNPERVKGIAFMEFIRPIPTWDEWPEFARETFQAFRTTDVGRKLIIDQNVFIEGTLPMGVVRPLTEVEMDHYREPFLNPVDREPLWRFPNELPIAGEPANIVALVEEYMDWLHQSPVPKLLFHGTPGVLIPPAEAARLAKSLPNCKAVDIGPGLNLLQEDNPDLIGSEIARWLSTLEISG

SEQ ID NO: 2492 - protein, 277 aa, Synthetic construct
MFHYVDVGPRDGTPVLFLHGNPTSSYVWRNIIPHVAPTHRCIAPDLIGMGKSDKPDLGYFFDDHVRFMDAFIEALGLEEVVLVIHDWGSALGFHWAKRNPERVKGIAFMEFIRPIPTWDEWPEFARETFQAFRTTDVGRKLIIDQNVFIEGTLPMGVVRPLTEVEMDHYREPFLNPVDREPLWRFPNELPIAGEPANIVALVEEYMDWLHQSPVPKLLFFGTPGVLIPPAEAARLAKSLPNCKAVDIGPGLNLLQEDNPDLIGSEIARWLSTLEISG

SEQ ID NO: 2493 - protein, 277 aa, Synthetic construct
MFHYVDVGPRDGTPVLFLHGNPTSSYVWRNIIPHVAPTHRCIAPDLIGMGKSDKPDLGYFFDDHVRFMDAFIEALGLEEVVLVIHDWGSALGFHWAKRNPERVKGIAFMEFIRPIPTWDEWPEFARETFQAFRTTDVGRKLIIDQNVFIEGTLPMGVVRPLTEVEMDHYREPFLNPVDREPLWRFPNELPIAGEPANIVALVEEYMDWLHQSPVPKLLFVGTPGVLIPPAEAARLAKSLPNCKAVDIGPGLNLLQEDNPDLIGSEIARWLSTLEISG

SEQ ID NO: 2494 - protein, 277 aa, Synthetic construct
MFHYVDVGPRDGTPVLFLHGNPTSSYVWRNIIPHVAPTHRCIAPDLIGMGKSDKPDLGYFFDDHVRFMDAFIEALGLEEVVLVIHDWGSALGFHWAKRNPERVKGIAFMEFIRPIPTWDEWPEFARETFQAFRTTDVGRKLIIDQNVFIEGTLPMGVVRPLTEVEMDHYREPFLNPVDREPLWRFPNELPIAGEPANIVALVEEYMDWLHQSPVPKLLFWATPGVLIPPAEAARLAKSLPNCKAVDIGPGLNLLQEDNPDLIGSEIARWLSTLEISG

SEQ ID NO: 2495 - protein, 277 aa, Synthetic construct
MFHYVDVGPRDGTPVLFLHGNPTSSYVWRNIIPHVAPTHRCIAPDLIGMGKSDKPDLGYFFDDHVRFMDAFIEALGLEEVVLVIHDWGSALGFHWAKRNPERVKGIAFMEFIRPIPTWDEWPEFARETFQAFRTTDVGRKLIIDQNVFIEGTLPMGVVRPLTEVEMDHYREPFLNPVDREPLWRFPNELPIAGEPANIVALVEEYMDWLHQSPVPKLLFWSTPGVLIPPAEAARLAKSLPNCKAVDIGPGLNLLQEDNPDLIGSEIARWLSTLEISG

SEQ ID NO: 2496 - protein, 277 aa, Synthetic construct
MFHYVDVGPRDGTPVLFLHGNPTSSYVWRNIIPHVAPTHRCIAPDLIGMGKSDKPDLGYFFDDHVRFMDAFIEALGLEEVVLVIHDWGSALGFHWAKRNPERVKGIAFMEFIRPIPTWDEWPEFARETFQAFRTTDVGRKLIIDQNVFIEGTLPMGVVRPLTEVEMDHYREPFLNPVDREPLWRFPNELPIAGEPANIVALVEEYMDWLHQSPVPKLLFWTTPGVLIPPAEAARLAKSLPNCKAVDIGPGLNLLQEDNPDLIGSEIARWLSTLEISG

SEQ ID NO: 2497 - protein, 277 aa, Synthetic construct
MFHYVDVGPRDGTPVLFLHGNPTSSYVWRNIIPHVAPTHRCIAPDLIGMGKSDKPDLGYFFDDHVRFMDAFIEALGLEEVVLVIHDWGSALGFHWAKRNPERVKGIAFMEFIRPIPTWDEWPEFARETFQAFRTTDVGRKLIIDQNVFIEGTLPMGVVRPLTEVEMDHYREPFLNPVDREPLWRFPNELPIAGEPANIVALVEEYMDWLHQSPVPKLLFWPTPGVLIPPAEAARLAKSLPNCKAVDIGPGLNLLQEDNPDLIGSEIARWLSTLEISG

SEQ ID NO: 2498 - protein, 277 aa, Synthetic construct
MFHYVDVGPRDGTPVLFLHGNPTSSYVWRNIIPHVAPTHRCIAPDLIGMGKSDKPDLGYFFDDHVRFMDAFIEALGLEEVVLVIHDWGSALGFHWAKRNPERVKGIAFMEFIRPIPTWDEWPEFARETFQAFRTTDVGRKLIIDQNVFIEGTLPMGVVRPLTEVEMDHYREPFLNPVDREPLWRFPNELPIAGEPANIVALVEEYMDWLHQSPVPKLLFWCTPGVLIPPAEAARLAKSLPNCKAVDIGPGLNLLQEDNPDLIGSEIARWLSTLEISG

SEQ ID NO: 2499 - protein, 277 aa, Synthetic construct
MFHYVDVGPRDGTPVLFLHGNPTSSYVWRNIIPHVAPTHRCIAPDLIGMGKSDKPDLGYFFDDHVRFMDAFIEALGLEEVVLVIHDWGSALGFHWAKRNPERVKGIAFMEFIRPIPTWDEWPEFARETFQAFRTTDVGRKLIIDQNVFIEGTLPMGVVRPLTEVEMDHYREPFLNPVDREPLWRFPNELPIAGEPANIVALVEEYMDWLHQSPVPKLLFWVTPGVLIPPAEAARLAKSLPNCKAVDIGPGLNLLQEDNPDLIGSEIARWLSTLEISG

SEQ ID NO: 2500 - protein, 277 aa, Synthetic construct
MFHYVDVGPRDGTPVLFLHGNPTSSYVWRNIIPHVAPTHRCIAPDLIGMGKSDKPDLGYFFDDHVRFMDAFIEALGLEEVVLVIHDWGSALGFHWAKRNPERVKGIAFMEFIRPIPTWDEWPEFARETFQAFRTTDVGRKLIIDQNVFIEGTLPMGVVRPLTEVEMDHYREPFLNPVDREPLWRFPNELPIAGEPANIVALVEEYMDWLHQSPVPKLLFWGKPGVLIPPAEAARLAKSLPNCKAVDIGPGLNLLQEDNPDLIGSEIARWLSTLEISG

SEQ ID NO: 2501 - protein, 277 aa, Synthetic construct
MFHYVDVGPRDGTPVLFLHGNPTSSYVWRNIIPHVAPTHRCIAPDLIGMGKSDKPDLGYFFDDHVRFMDAFIEALGLEEVVLVIHDWGSALGFHWAKRNPERVKGIAFMEFIRPIPTWDEWPEFARETFQAFRTTDVGRKLIIDQNVFIEGTLPMGVVRPLTEVEMDHYREPFLNPVDREPLWRFPNELPIAGEPANIVALVEEYMDWLHQSPVPKLLFWGEPGVLIPPAEAARLAKSLPNCKAVDIGPGLNLLQEDNPDLIGSEIARWLSTLEISG

SEQ ID NO: 2502 - protein, 277 aa, Synthetic construct
MFHYVDVGPRDGTPVLFLHGNPTSSYVWRNIIPHVAPTHRCIAPDLIGMGKSDKPDLGYFFDDHVRFMDAFIEALGLEEVVLVIHDWGSALGFHWAKRNPERVKGIAFMEFIRPIPTWDEWPEFARETFQAFRTTDVGRKLIIDQNVFIEGTLPMGVVRPLTEVEMDHYREPFLNPVDREPLWRFPNELPIAGEPANIVALVEEYMDWLHQSPVPKLLFWGNPGVLIPPAEAARLAKSLPNCKAVDIGPGLNLLQEDNPDLIGSEIARWLSTLEISG

SEQ ID NO: 2503 - protein, 277 aa, Synthetic construct
MFHYVDVGPRDGTPVLFLHGNPTSSYVWRNIIPHVAPTHRCIAPDLIGMGKSDKPDLGYFFDDHVRFMDAFIEALGLEEVVLVIHDWGSALGFHWAKRNPERVKGIAFMEFIRPIPTWDEWPEFARETFQAFRTTDVGRKLIIDQNVFIEGTLPMGVVRPLTEVEMDHYREPFLNPVDREPLWRFPNELPIAGEPANIVALVEEYMDWLHQSPVPKLLFWGAPGVLIPPAEAARLAKSLPNCKAVDIGPGLNLLQEDNPDLIGSEIARWLSTLEISG

SEQ ID NO: 2504 - protein, 277 aa, Synthetic construct
MFHYVDVGPRDGTPVLFLHGNPTSSYVWRNIIPHVAPTHRCIAPDLIGMGKSDKPDLGYFFDDHVRFMDAFIEALGLEEVVLVIHDWGSALGFHWAKRNPERVKGIAFMEFIRPIPTWDEWPEFARETFQAFRTTDVGRKLIIDQNVFIEGTLPMGVVRPLTEVEMDHYREPFLNPVDREPLWRFPNELPIAGEPANIVALVEEYMDWLHQSPVPKLLFWGRPGVLIPPAEAARLAKSLPNCKAVDIGPGLNLLQEDNPDLIGSEIARWLSTLEISG

SEQ ID NO: 2505 - protein, 277 aa, Synthetic construct
MFHYVDVGPRDGTPVLFLHGNPTSSYVWRNIIPHVAPTHRCIAPDLIGMGKSDKPDLGYFFDDHVRFMDAFIEALGLEEVVLVIHDWGSALGFHWAKRNPERVKGIAFMEFIRPIPTWDEWPEFARETFQAFRTTDVGRKLIIDQNVFIEGTLPMGVVRPLTEVEMDHYREPFLNPVDREPLWRFPNELPIAGEPANIVALVEEYMDWLHQSPVPKLLFWGDPGVLIPPAEAARLAKSLPNCKAVDIGPGLNLLQEDNPDLIGSEIARWLSTLEISG

SEQ ID NO: 2506 - protein, 277 aa, Synthetic construct
MFHYVDVGPRDGTPVLFLHGNPTSSYVWRNIIPHVAPTHRCIAPDLIGMGKSDKPDLGYFFDDHVRFMDAFIEALGLEEVVLVIHDWGSALGFHWAKRNPERVKGIAFMEFIRPIPTWDEWPEFARETFQAFRTTDVGRKLIIDQNVFIEGTLPMGVVRPLTEVEMDHYREPFLNPVDREPLWRFPNELPIAGEPANIVALVEEYMDWLHQSPVPKLLFWGTEGVLIPPAEAARLAKSLPNCKAVDIGPGLNLLQEDNPDLIGSEIARWLSTLEISG

SEQ ID NO: 2507 - protein, 277 aa, Synthetic construct
MFHYVDVGPRDGTPVLFLHGNPTSSYVWRNIIPHVAPTHRCIAPDLIGMGKSDKPDLGYFFDDHVRFMDAFIEALGLEEVVLVIHDWGSALGFHWAKRNPERVKGIAFMEFIRPIPTWDEWPEFARETFQAFRTTDVGRKLIIDQNVFIEGTLPMGVVRPLTEVEMDHYREPFLNPVDREPLWRFPNELPIAGEPANIVALVEEYMDWLHQSPVPKLLFWGTKGVLIPPAEAARLAKSLPNCKAVDIGPGLNLLQEDNPDLIGSEIARWLSTLEISG

SEQ ID NO: 2508 - protein, 277 aa, Synthetic construct
MFHYVDVGPRDGTPVLFLHGNPTSSYVWRNIIPHVAPTHRCIAPDLIGMGKSDKPDLGYFFDDHVRFMDAFIEALGLEEVVLVIHDWGSALGFHWAKRNPERVKGIAFMEFIRPIPTWDEWPEFARETFQAFRTTDVGRKLIIDQNVFIEGTLPMGVVRPLTEVEMDHYREPFLNPVDREPLWRFPNELPIAGEPANIVALVEEYMDWLHQSPVPKLLFWGTAGVLIPPAEAARLAKSLPNCKAVDIGPGLNLLQEDNPDLIGSEIARWLSTLEISG

SEQ ID NO: 2509 - protein, 277 aa, Synthetic construct
MFHYVDVGPRDGTPVLFLHGNPTSSYVWRNIIPHVAPTHRCIAPDLIGMGKSDKPDLGYFFDDHVRFMDAFIEALGLEEVVLVIHDWGSALGFHWAKRNPERVKGIAFMEFIRPIPTWDEWPEFARETFQAFRTTDVGRKLIIDQNVFIEGTLPMGVVRPLTEVEMDHYREPFLNPVDREPLWRFPNELPIAGEPANIVALVEEYMDWLHQSPVPKLLFWGTDGVLIPPAEAARLAKSLPNCKAVDIGPGLNLLQEDNPDLIGSEIARWLSTLEISG

SEQ ID NO: 2510 - protein, 277 aa, Synthetic construct
MFHYVDVGPRDGTPVLFLHGNPTSSYVWRNIIPHVAPTHRCIAPDLIGMGKSDKPDLGYFFDDHVRFMDAFIEALGLEEVVLVIHDWGSALGFHWAKRNPERVKGIAFMEFIRPIPTWDEWPEFARETFQAFRTTDVGRKLIIDQNVFIEGTLPMGVVRPLTEVEMDHYREPFLNPVDREPLWRFPNELPIAGEPANIVALVEEYMDWLHQSPVPKLLFWGTSGVLIPPAEAARLAKSLPNCKAVDIGPGLNLLQEDNPDLIGSEIARWLSTLEISG

SEQ ID NO: 2511 - protein, 277 aa, Synthetic construct
MFHYVDVGPRDGTPVLFLHGNPTSSYVWRNIIPHVAPTHRCIAPDLIGMGKSDKPDLGYFFDDHVRFMDAFIEALGLEEVVLVIHDWGSALGFHWAKRNPERVKGIAFMEFIRPIPTWDEWPEFARETFQAFRTTDVGRKLIIDQNVFIEGTLPMGVVRPLTEVEMDHYREPFLNPVDREPLWRFPNELPIAGEPANIVALVEEYMDWLHQSPVPKLLFWGTQGVLIPPAEAARLAKSLPNCKAVDIGPGLNLLQEDNPDLIGSEIARWLSTLEISG

SEQ ID NO: 2512 - protein, 277 aa, Synthetic construct
MFHYVDVGPRDGTPVLFLHGNPTSSYVWRNIIPHVAPTHRCIAPDLIGMGKSDKPDLGYFFDDHVRFMDAFIEALGLEEVVLVIHDWGSALGFHWAKRNPERVKGIAFMEFIRPIPTWDEWPEFARETFQAFRTTDVGRKLIIDQNVFIEGTLPMGVVRPLTEVEMDHYREPFLNPVDREPLWRFPNELPIAGEPANIVALVEEYMDWLHQSPVPKLLFWGTPSVLIPPAEAARLAKSLPNCKAVDIGPGLNLLQEDNPDLIGSEIARWLSTLEISG

SEQ ID NO: 2513 - protein, 277 aa, Synthetic construct
MFHYVDVGPRDGTPVLFLHGNPTSSYVWRNIIPHVAPTHRCIAPDLIGMGKSDKPDLGYFFDDHVRFMDAFIEALGLEEVVLVIHDWGSALGFHWAKRNPERVKGIAFMEFIRPIPTWDEWPEFARETFQAFRTTDVGRKLIIDQNVFIEGTLPMGVVRPLTEVEMDHYREPFLNPVDREPLWRFPNELPIAGEPANIVALVEEYMDWLHQSPVPKLLFWGTPAVLIPPAEAARLAKSLPNCKAVDIGPGLNLLQEDNPDLIGSEIARWLSTLEISG

SEQ ID NO: 2514 - protein, 277 aa, Synthetic construct
MFHYVDVGPRDGTPVLFLHGNPTSSYVWRNIIPHVAPTHRCIAPDLIGMGKSDKPDLGYFFDDHVRFMDAFIEALGLEEVVLVIHDWGSALGFHWAKRNPERVKGIAFMEFIRPIPTWDEWPEFARETFQAFRTTDVGRKLIIDQNVFIEGTLPMGVVRPLTEVEMDHYREPFLNPVDREPLWRFPNELPIAGEPANIVALVEEYMDWLHQSPVPKLLFWGTPDVLIPPAEAARLAKSLPNCKAVDIGPGLNLLQEDNPDLIGSEIARWLSTLEISG

SEQ ID NO: 2515 - protein, 277 aa, Synthetic construct
MFHYVDVGPRDGTPVLFLHGNPTSSYVWRNIIPHVAPTHRCIAPDLIGMGKSDKPDLGYFFDDHVRFMDAFIEALGLEEVVLVIHDWGSALGFHWAKRNPERVKGIAFMEFIRPIPTWDEWPEFARETFQAFRTTDVGRKLIIDQNVFIEGTLPMGVVRPLTEVEMDHYREPFLNPVDREPLWRFPNELPIAGEPANIVALVEEYMDWLHQSPVPKLLFWGTPNVLIPPAEAARLAKSLPNCKAVDIGPGLNLLQEDNPDLIGSEIARWLSTLEISG

SEQ ID NO: 2516 - protein, 277 aa, Synthetic construct
MFHYVDVGPRDGTPVLFLHGNPTSSYVWRNIIPHVAPTHRCIAPDLIGMGKSDKPDLGYFFDDHVRFMDAFIEALGLEEVVLVIHDWGSALGFHWAKRNPERVKGIAFMEFIRPIPTWDEWPEFARETFQAFRTTDVGRKLIIDQNVFIEGTLPMGVVRPLTEVEMDHYREPFLNPVDREPLWRFPNELPIAGEPANIVALVEEYMDWLHQSPVPKLLFWGTPTVLIPPAEAARLAKSLPNCKAVDIGPGLNLLQEDNPDLIGSEIARWLSTLEISG

SEQ ID NO: 2517 - protein, 277 aa, Synthetic construct
MFHYVDVGPRDGTPVLFLHGNPTSSYVWRNIIPHVAPTHRCIAPDLIGMGKSDKPDLGYFFDDHVRFMDAFIEALGLEEVVLVIHDWGSALGFHWAKRNPERVKGIAFMEFIRPIPTWDEWPEFARETFQAFRTTDVGRKLIIDQNVFIEGTLPMGVVRPLTEVEMDHYREPFLNPVDREPLWRFPNELPIAGEPANIVALVEEYMDWLHQSPVPKLLFWGTPPVLIPPAEAARLAKSLPNCKAVDIGPGLNLLQEDNPDLIGSEIARWLSTLEISG

SEQ ID NO: 2518 - protein, 277 aa, Synthetic construct
MFHYVDVGPRDGTPVLFLHGNPTSSYVWRNIIPHVAPTHRCIAPDLIGMGKSDKPDLGYFFDDHVRFMDAFIEALGLEEVVLVIHDWGSALGFHWAKRNPERVKGIAFMEFIRPIPTWDEWPEFARETFQAFRTTDVGRKLIIDQNVFIEGTLPMGVVRPLTEVEMDHYREPFLNPVDREPLWRFPNELPIAGEPANIVALVEEYMDWLHQSPVPKLLFWGTPGALIPPAEAARLAKSLPNCKAVDIGPGLNLLQEDNPDLIGSEIARWLSTLEISG

SEQ ID NO: 2519 - protein, 277 aa, Synthetic construct
MFHYVDVGPRDGTPVLFLHGNPTSSYVWRNIIPHVAPTHRCIAPDLIGMGKSDKPDLGYFFDDHVRFMDAFIEALGLEEVVLVIHDWGSALGFHWAKRNPERVKGIAFMEFIRPIPTWDEWPEFARETFQAFRTTDVGRKLIIDQNVFIEGTLPMGVVRPLTEVEMDHYREPFLNPVDREPLWRFPNELPIAGEPANIVALVEEYMDWLHQSPVPKLLFWGTPGSLIPPAEAARLAKSLPNCKAVDIGPGLNLLQEDNPDLIGSEIARWLSTLEISG

SEQ ID NO: 2520 - protein, 277 aa, Synthetic construct
MFHYVDVGPRDGTPVLFLHGNPTSSYVWRNIIPHVAPTHRCIAPDLIGMGKSDKPDLGYFFDDHVRFMDAFIEALGLEEVVLVIHDWGSALGFHWAKRNPERVKGIAFMEFIRPIPTWDEWPEFARETFQAFRTTDVGRKLIIDQNVFIEGTLPMGVVRPLTEVEMDHYREPFLNPVDREPLWRFPNELPIAGEPANIVALVEEYMDWLHQSPVPKLLFWGTPGTLIPPAEAARLAKSLPNCKAVDIGPGLNLLQEDNPDLIGSEIARWLSTLEISG

SEQ ID NO: 2521 - protein, 277 aa, Synthetic construct
MFHYVDVGPRDGTPVLFLHGNPTSSYVWRNIIPHVAPTHRCIAPDLIGMGKSDKPDLGYFFDDHVRFMDAFIEALGLEEVVLVIHDWGSALGFHWAKRNPERVKGIAFMEFIRPIPTWDEWPEFARETFQAFRTTDVGRKLIIDQNVFIEGTLPMGVVRPLTEVEMDHYREPFLNPVDREPLWRFPNELPIAGEPANIVALVEEYMDWLHQSPVPKLLFWGTPGGLIPPAEAARLAKSLPNCKAVDIGPGLNLLQEDNPDLIGSEIARWLSTLEISG

SEQ ID NO: 2522 - protein, 277 aa, Synthetic construct
MFHYVDVGPRDGTPVLFLHGNPTSSYVWRNIIPHVAPTHRCIAPDLIGMGKSDKPDLGYFFDDHVRFMDAFIEALGLEEVVLVIHDWGSALGFHWAKRNPERVKGIAFMEFIRPIPTWDEWPEFARETFQAFRTTDVGRKLIIDQNVFIEGTLPMGVVRPLTEVEMDHYREPFLNPVDREPLWRFPNELPIAGEPANIVALVEEYMDWLHQSPVPKLLFWGTPGPLIPPAEAARLAKSLPNCKAVDIGPGLNLLQEDNPDLIGSEIARWLSTLEISG

SEQ ID NO: 2523 - protein, 277 aa, Synthetic construct
MFHYVDVGPRDGTPVLFLHGNPTSSYVWRNIIPHVAPTHRCIAPDLIGMGKSDKPDLGYFFDDHVRFMDAFIEALGLEEVVLVIHDWGSALGFHWAKRNPERVKGIAFMEFIRPIPTWDEWPEFARETFQAFRTTDVGRKLIIDQNVFIEGTLPMGVVRPLTEVEMDHYREPFLNPVDREPLWRFPNELPIAGEPANIVALVEEYMDWLHQSPVPKLLFWGTPGRLIPPAEAARLAKSLPNCKAVDIGPGLNLLQEDNPDLIGSEIARWLSTLEISG

SEQ ID NO: 2524 - protein, 277 aa, Synthetic construct
MFHYVDVGPRDGTPVLFLHGNPTSSYVWRNIIPHVAPTHRCIAPDLIGMGKSDKPDLGYFFDDHVRFMDAFIEALGLEEVVLVIHDWGSALGFHWAKRNPERVKGIAFMEFIRPIPTWDEWPEFARETFQAFRTTDVGRKLIIDQNVFIEGTLPMGVVRPLTEVEMDHYREPFLNPVDREPLWRFPNELPIAGEPANIVALVEEYMDWLHQSPVPKLLFWGTPGVIIPPAEAARLAKSLPNCKAVDIGPGLNLLQEDNPDLIGSEIARWLSTLEISG

SEQ ID NO: 2525 - protein, 277 aa, Synthetic construct
MFHYVDVGPRDGTPVLFLHGNPTSSYVWRNIIPHVAPTHRCIAPDLIGMGKSDKPDLGYFFDDHVRFMDAFIEALGLEEVVLVIHDWGSALGFHWAKRNPERVKGIAFMEFIRPIPTWDEWPEFARETFQAFRTTDVGRKLIIDQNVFIEGTLPMGVVRPLTEVEMDHYREPFLNPVDREPLWRFPNELPIAGEPANIVALVEEYMDWLHQSPVPKLLFWGTPGVVIPPAEAARLAKSLPNCKAVDIGPGLNLLQEDNPDLIGSEIARWLSTLEISG

SEQ ID NO: 2526 - protein, 277 aa, Synthetic construct
MFHYVDVGPRDGTPVLFLHGNPTSSYVWRNIIPHVAPTHRCIAPDLIGMGKSDKPDLGYFFDDHVRFMDAFIEALGLEEVVLVIHDWGSALGFHWAKRNPERVKGIAFMEFIRPIPTWDEWPEFARETFQAFRTTDVGRKLIIDQNVFIEGTLPMGVVRPLTEVEMDHYREPFLNPVDREPLWRFPNELPIAGEPANIVALVEEYMDWLHQSPVPKLLFWGTPGVFIPPAEAARLAKSLPNCKAVDIGPGLNLLQEDNPDLIGSEIARWLSTLEISG

SEQ ID NO: 2527 - protein, 277 aa, Synthetic construct
MFHYVDVGPRDGTPVLFLHGNPTSSYVWRNIIPHVAPTHRCIAPDLIGMGKSDKPDLGYFFDDHVRFMDAFIEALGLEEVVLVIHDWGSALGFHWAKRNPERVKGIAFMEFIRPIPTWDEWPEFARETFQAFRTTDVGRKLIIDQNVFIEGTLPMGVVRPLTEVEMDHYREPFLNPVDREPLWRFPNELPIAGEPANIVALVEEYMDWLHQSPVPKLLFWGTPGVMIPPAEAARLAKSLPNCKAVDIGPGLNLLQEDNPDLIGSEIARWLSTLEISG

SEQ ID NO: 2528 - protein, 277 aa, Synthetic construct
MFHYVDVGPRDGTPVLFLHGNPTSSYVWRNIIPHVAPTHRCIAPDLIGMGKSDKPDLGYFFDDHVRFMDAFIEALGLEEVVLVIHDWGSALGFHWAKRNPERVKGIAFMEFIRPIPTWDEWPEFARETFQAFRTTDVGRKLIIDQNVFIEGTLPMGVVRPLTEVEMDHYREPFLNPVDREPLWRFPNELPIAGEPANIVALVEEYMDWLHQSPVPKLLFWGTPGVAIPPAEAARLAKSLPNCKAVDIGPGLNLLQEDNPDLIGSEIARWLSTLEISG

SEQ ID NO: 2529 - protein, 277 aa, Synthetic construct
MFHYVDVGPRDGTPVLFLHGNPTSSYVWRNIIPHVAPTHRCIAPDLIGMGKSDKPDLGYFFDDHVRFMDAFIEALGLEEVVLVIHDWGSALGFHWAKRNPERVKGIAFMEFIRPIPTWDEWPEFARETFQAFRTTDVGRKLIIDQNVFIEGTLPMGVVRPLTEVEMDHYREPFLNPVDREPLWRFPNELPIAGEPANIVALVEEYMDWLHQSPVPKLLFWGTPGVTIPPAEAARLAKSLPNCKAVDIGPGLNLLQEDNPDLIGSEIARWLSTLEISG

SEQ ID NO: 2530 - protein, 277 aa, Synthetic construct
MFHYVDVGPRDGTPVLFLHGNPTSSYVWRNIIPHVAPTHRCIAPDLIGMGKSDKPDLGYFFDDHVRFMDAFIEALGLEEVVLVIHDWGSALGFHWAKRNPERVKGIAFMEFIRPIPTWDEWPEFARETFQAFRTTDVGRKLIIDQNVFIEGTLPMGVVRPLTEVEMDHYREPFLNPVDREPLWRFPNELPIAGEPANIVALVEEYMDWLHQSPVPKLLFWGTPGVLLPPAEAARLAKSLPNCKAVDIGPGLNLLQEDNPDLIGSEIARWLSTLEISG

SEQ ID NO: 2531 - protein, 277 aa, Synthetic construct
MFHYVDVGPRDGTPVLFLHGNPTSSYVWRNIIPHVAPTHRCIAPDLIGMGKSDKPDLGYFFDDHVRFMDAFIEALGLEEVVLVIHDWGSALGFHWAKRNPERVKGIAFMEFIRPIPTWDEWPEFARETFQAFRTTDVGRKLIIDQNVFIEGTLPMGVVRPLTEVEMDHYREPFLNPVDREPLWRFPNELPIAGEPANIVALVEEYMDWLHQSPVPKLLFWGTPGVLFPPAEAARLAKSLPNCKAVDIGPGLNLLQEDNPDLIGSEIARWLSTLEISG

SEQ ID NO: 2532 - protein, 277 aa, Synthetic construct
MFHYVDVGPRDGTPVLFLHGNPTSSYVWRNIIPHVAPTHRCIAPDLIGMGKSDKPDLGYFFDDHVRFMDAFIEALGLEEVVLVIHDWGSALGFHWAKRNPERVKGIAFMEFIRPIPTWDEWPEFARETFQAFRTTDVGRKLIIDQNVFIEGTLPMGVVRPLTEVEMDHYREPFLNPVDREPLWRFPNELPIAGEPANIVALVEEYMDWLHQSPVPKLLFWGTPGVLMPPAEAARLAKSLPNCKAVDIGPGLNLLQEDNPDLIGSEIARWLSTLEISG

SEQ ID NO: 2533 - protein, 277 aa, Synthetic construct
MFHYVDVGPRDGTPVLFLHGNPTSSYVWRNIIPHVAPTHRCIAPDLIGMGKSDKPDLGYFFDDHVRFMDAFIEALGLEEVVLVIHDWGSALGFHWAKRNPERVKGIAFMEFIRPIPTWDEWPEFARETFQAFRTTDVGRKLIIDQNVFIEGTLPMGVVRPLTEVEMDHYREPFLNPVDREPLWRFPNELPIAGEPANIVALVEEYMDWLHQSPVPKLLFWGTPGVLVPPAEAARLAKSLPNCKAVDIGPGLNLLQEDNPDLIGSEIARWLSTLEISG

SEQ ID NO: 2534 - protein, 277 aa, Synthetic construct
MFHYVDVGPRDGTPVLFLHGNPTSSYVWRNIIPHVAPTHRCIAPDLIGMGKSDKPDLGYFFDDHVRFMDAFIEALGLEEVVLVIHDWGSALGFHWAKRNPERVKGIAFMEFIRPIPTWDEWPEFARETFQAFRTTDVGRKLIIDQNVFIEGTLPMGVVRPLTEVEMDHYREPFLNPVDREPLWRFPNELPIAGEPANIVALVEEYMDWLHQSPVPKLLFWGTPGVLAPPAEAARLAKSLPNCKAVDIGPGLNLLQEDNPDLIGSEIARWLSTLEISG

SEQ ID NO: 2535 - protein, 277 aa, Synthetic construct
MFHYVDVGPRDGTPVLFLHGNPTSSYVWRNIIPHVAPTHRCIAPDLIGMGKSDKPDLGYFFDDHVRFMDAFIEALGLEEVVLVIHDWGSALGFHWAKRNPERVKGIAFMEFIRPIPTWDEWPEFARETFQAFRTTDVGRKLIIDQNVFIEGTLPMGVVRPLTEVEMDHYREPFLNPVDREPLWRFPNELPIAGEPANIVALVEEYMDWLHQSPVPKLLFWGTPGVLTPPAEAARLAKSLPNCKAVDIGPGLNLLQEDNPDLIGSEIARWLSTLEISG

SEQ ID NO: 2536 - protein, 277 aa, Synthetic construct
MFHYVDVGPRDGTPVLFLHGNPTSSYVWRNIIPHVAPTHRCIAPDLIGMGKSDKPDLGYFFDDHVRFMDAFIEALGLEEVVLVIHDWGSALGFHWAKRNPERVKGIAFMEFIRPIPTWDEWPEFARETFQAFRTTDVGRKLIIDQNVFIEGTLPMGVVRPLTEVEMDHYREPFLNPVDREPLWRFPNELPIAGEPANIVALVEEYMDWLHQSPVPKLLFWGTPGVLITPAEAARLAKSLPNCKAVDIGPGLNLLQEDNPDLIGSEIARWLSTLEISG

SEQ ID NO: 2537 - protein, 277 aa, Synthetic construct
MFHYVDVGPRDGTPVLFLHGNPTSSYVWRNIIPHVAPTHRCIAPDLIGMGKSDKPDLGYFFDDHVRFMDAFIEALGLEEVVLVIHDWGSALGFHWAKRNPERVKGIAFMEFIRPIPTWDEWPEFARETFQAFRTTDVGRKLIIDQNVFIEGTLPMGVVRPLTEVEMDHYREPFLNPVDREPLWRFPNELPIAGEPANIVALVEEYMDWLHQSPVPKLLFWGTPGVLIGPAEAARLAKSLPNCKAVDIGPGLNLLQEDNPDLIGSEIARWLSTLEISG

SEQ ID NO: 2538 - protein, 277 aa, Synthetic construct
MFHYVDVGPRDGTPVLFLHGNPTSSYVWRNIIPHVAPTHRCIAPDLIGMGKSDKPDLGYFFDDHVRFMDAFIEALGLEEVVLVIHDWGSALGFHWAKRNPERVKGIAFMEFIRPIPTWDEWPEFARETFQAFRTTDVGRKLIIDQNVFIEGTLPMGVVRPLTEVEMDHYREPFLNPVDREPLWRFPNELPIAGEPANIVALVEEYMDWLHQSPVPKLLFWGTPGVLISPAEAARLAKSLPNCKAVDIGPGLNLLQEDNPDLIGSEIARWLSTLEISG

SEQ ID NO: 2539 - protein, 277 aa, Synthetic construct
MFHYVDVGPRDGTPVLFLHGNPTSSYVWRNIIPHVAPTHRCIAPDLIGMGKSDKPDLGYFFDDHVRFMDAFIEALGLEEVVLVIHDWGSALGFHWAKRNPERVKGIAFMEFIRPIPTWDEWPEFARETFQAFRTTDVGRKLIIDQNVFIEGTLPMGVVRPLTEVEMDHYREPFLNPVDREPLWRFPNELPIAGEPANIVALVEEYMDWLHQSPVPKLLFWGTPGVLIAPAEAARLAKSLPNCKAVDIGPGLNLLQEDNPDLIGSEIARWLSTLEISG

SEQ ID NO: 2540 - protein, 277 aa, Synthetic construct
MFHYVDVGPRDGTPVLFLHGNPTSSYVWRNIIPHVAPTHRCIAPDLIGMGKSDKPDLGYFFDDHVRFMDAFIEALGLEEVVLVIHDWGSALGFHWAKRNPERVKGIAFMEFIRPIPTWDEWPEFARETFQAFRTTDVGRKLIIDQNVFIEGTLPMGVVRPLTEVEMDHYREPFLNPVDREPLWRFPNELPIAGEPANIVALVEEYMDWLHQSPVPKLLFWGTPGVLIRPAEAARLAKSLPNCKAVDIGPGLNLLQEDNPDLIGSEIARWLSTLEISG

SEQ ID NO: 2541 - protein, 277 aa, Synthetic construct
MFHYVDVGPRDGTPVLFLHGNPTSSYVWRNIIPHVAPTHRCIAPDLIGMGKSDKPDLGYFFDDHVRFMDAFIEALGLEEVVLVIHDWGSALGFHWAKRNPERVKGIAFMEFIRPIPTWDEWPEFARETFQAFRTTDVGRKLIIDQNVFIEGTLPMGVVRPLTEVEMDHYREPFLNPVDREPLWRFPNELPIAGEPANIVALVEEYMDWLHQSPVPKLLFWGTPGVLIKPAEAARLAKSLPNCKAVDIGPGLNLLQEDNPDLIGSEIARWLSTLEISG

SEQ ID NO: 2542 - protein, 277 aa, Synthetic construct
MFHYVDVGPRDGTPVLFLHGNPTSSYVWRNIIPHVAPTHRCIAPDLIGMGKSDKPDLGYFFDDHVRFMDAFIEALGLEEVVLVIHDWGSALGFHWAKRNPERVKGIAFMEFIRPIPTWDEWPEFARETFQAFRTTDVGRKLIIDQNVFIEGTLPMGVVRPLTEVEMDHYREPFLNPVDREPLWRFPNELPIAGEPANIVALVEEYMDWLHQSPVPKLLFWGTPGVLIPAAEAARLAKSLPNCKAVDIGPGLNLLQEDNPDLIGSEIARWLSTLEISG

SEQ ID NO: 2543 - protein, 277 aa, Synthetic construct
MFHYVDVGPRDGTPVLFLHGNPTSSYVWRNIIPHVAPTHRCIAPDLIGMGKSDKPDLGYFFDDHVRFMDAFIEALGLEEVVLVIHDWGSALGFHWAKRNPERVKGIAFMEFIRPIPTWDEWPEFARETFQAFRTTDVGRKLIIDQNVFIEGTLPMGVVRPLTEVEMDHYREPFLNPVDREPLWRFPNELPIAGEPANIVALVEEYMDWLHQSPVPKLLFWGTPGVLIPKAEAARLAKSLPNCKAVDIGPGLNLLQEDNPDLIGSEIARWLSTLEISG

SEQ ID NO: 2544 - protein, 277 aa, Synthetic construct
MFHYVDVGPRDGTPVLFLHGNPTSSYVWRNIIPHVAPTHRCIAPDLIGMGKSDKPDLGYFFDDHVRFMDAFIEALGLEEVVLVIHDWGSALGFHWAKRNPERVKGIAFMEFIRPIPTWDEWPEFARETFQAFRTTDVGRKLIIDQNVFIEGTLPMGVVRPLTEVEMDHYREPFLNPVDREPLWRFPNELPIAGEPANIVALVEEYMDWLHQSPVPKLLFWGTPGVLIPRAEAARLAKSLPNCKAVDIGPGLNLLQEDNPDLIGSEIARWLSTLEISG

SEQ ID NO: 2545 - protein, 277 aa, Synthetic construct
MFHYVDVGPRDGTPVLFLHGNPTSSYVWRNIIPHVAPTHRCIAPDLIGMGKSDKPDLGYFFDDHVRFMDAFIEALGLEEVVLVIHDWGSALGFHWAKRNPERVKGIAFMEFIRPIPTWDEWPEFARETFQAFRTTDVGRKLIIDQNVFIEGTLPMGVVRPLTEVEMDHYREPFLNPVDREPLWRFPNELPIAGEPANIVALVEEYMDWLHQSPVPKLLFWGTPGVLIPEAEAARLAKSLPNCKAVDIGPGLNLLQEDNPDLIGSEIARWLSTLEISG

SEQ ID NO: 2546 - protein, 277 aa, Synthetic construct
MFHYVDVGPRDGTPVLFLHGNPTSSYVWRNIIPHVAPTHRCIAPDLIGMGKSDKPDLGYFFDDHVRFMDAFIEALGLEEVVLVIHDWGSALGFHWAKRNPERVKGIAFMEFIRPIPTWDEWPEFARETFQAFRTTDVGRKLIIDQNVFIEGTLPMGVVRPLTEVEMDHYREPFLNPVDREPLWRFPNELPIAGEPANIVALVEEYMDWLHQSPVPKLLFWGTPGVLIPQAEAARLAKSLPNCKAVDIGPGLNLLQEDNPDLIGSEIARWLSTLEISG

SEQ ID NO: 2547 - protein, 277 aa, Synthetic construct
MFHYVDVGPRDGTPVLFLHGNPTSSYVWRNIIPHVAPTHRCIAPDLIGMGKSDKPDLGYFFDDHVRFMDAFIEALGLEEVVLVIHDWGSALGFHWAKRNPERVKGIAFMEFIRPIPTWDEWPEFARETFQAFRTTDVGRKLIIDQNVFIEGTLPMGVVRPLTEVEMDHYREPFLNPVDREPLWRFPNELPIAGEPANIVALVEEYMDWLHQSPVPKLLFWGTPGVLIPVAEAARLAKSLPNCKAVDIGPGLNLLQEDNPDLIGSEIARWLSTLEISG

SEQ ID NO: 2548 - protein, 277 aa, Synthetic construct
MFHYVDVGPRDGTPVLFLHGNPTSSYVWRNIIPHVAPTHRCIAPDLIGMGKSDKPDLGYFFDDHVRFMDAFIEALGLEEVVLVIHDWGSALGFHWAKRNPERVKGIAFMEFIRPIPTWDEWPEFARETFQAFRTTDVGRKLIIDQNVFIEGTLPMGVVRPLTEVEMDHYREPFLNPVDREPLWRFPNELPIAGEPANIVALVEEYMDWLHQSPVPKLLFWGTPGVLIPPEEAARLAKSLPNCKAVDIGPGLNLLQEDNPDLIGSEIARWLSTLEISG

SEQ ID NO: 2549 - protein, 277 aa, Synthetic construct
MFHYVDVGPRDGTPVLFLHGNPTSSYVWRNIIPHVAPTHRCIAPDLIGMGKSDKPDLGYFFDDHVRFMDAFIEALGLEEVVLVIHDWGSALGFHWAKRNPERVKGIAFMEFIRPIPTWDEWPEFARETFQAFRTTDVGRKLIIDQNVFIEGTLPMGVVRPLTEVEMDHYREPFLNPVDREPLWRFPNELPIAGEPANIVALVEEYMDWLHQSPVPKLLFWGTPGVLIPPDEAARLAKSLPNCKAVDIGPGLNLLQEDNPDLIGSEIARWLSTLEISG

SEQ ID NO: 2550 - protein, 277 aa, Synthetic construct
MFHYVDVGPRDGTPVLFLHGNPTSSYVWRNIIPHVAPTHRCIAPDLIGMGKSDKPDLGYFFDDHVRFMDAFIEALGLEEVVLVIHDWGSALGFHWAKRNPERVKGIAFMEFIRPIPTWDEWPEFARETFQAFRTTDVGRKLIIDQNVFIEGTLPMGVVRPLTEVEMDHYREPFLNPVDREPLWRFPNELPIAGEPANIVALVEEYMDWLHQSPVPKLLFWGTPGVLIPPSEAARLAKSLPNCKAVDIGPGLNLLQEDNPDLIGSEIARWLSTLEISG

SEQ ID NO: 2551 - protein, 277 aa, Synthetic construct
MFHYVDVGPRDGTPVLFLHGNPTSSYVWRNIIPHVAPTHRCIAPDLIGMGKSDKPDLGYFFDDHVRFMDAFIEALGLEEVVLVIHDWGSALGFHWAKRNPERVKGIAFMEFIRPIPTWDEWPEFARETFQAFRTTDVGRKLIIDQNVFIEGTLPMGVVRPLTEVEMDHYREPFLNPVDREPLWRFPNELPIAGEPANIVALVEEYMDWLHQSPVPKLLFWGTPGVLIPPGEAARLAKSLPNCKAVDIGPGLNLLQEDNPDLIGSEIARWLSTLEISG

SEQ ID NO: 2552 - protein, 277 aa, Synthetic construct
MFHYVDVGPRDGTPVLFLHGNPTSSYVWRNIIPHVAPTHRCIAPDLIGMGKSDKPDLGYFFDDHVRFMDAFIEALGLEEVVLVIHDWGSALGFHWAKRNPERVKGIAFMEFIRPIPTWDEWPEFARETFQAFRTTDVGRKLIIDQNVFIEGTLPMGVVRPLTEVEMDHYREPFLNPVDREPLWRFPNELPIAGEPANIVALVEEYMDWLHQSPVPKLLFWGTPGVLIPPPEAARLAKSLPNCKAVDIGPGLNLLQEDNPDLIGSEIARWLSTLEISG

SEQ ID NO: 2553 - protein, 277 aa, Synthetic construct
MFHYVDVGPRDGTPVLFLHGNPTSSYVWRNIIPHVAPTHRCIAPDLIGMGKSDKPDLGYFFDDHVRFMDAFIEALGLEEVVLVIHDWGSALGFHWAKRNPERVKGIAFMEFIRPIPTWDEWPEFARETFQAFRTTDVGRKLIIDQNVFIEGTLPMGVVRPLTEVEMDHYREPFLNPVDREPLWRFPNELPIAGEPANIVALVEEYMDWLHQSPVPKLLFWGTPGVLIPPKEAARLAKSLPNCKAVDIGPGLNLLQEDNPDLIGSEIARWLSTLEISG

SEQ ID NO: 2554 - protein, 277 aa, Synthetic construct
MFHYVDVGPRDGTPVLFLHGNPTSSYVWRNIIPHVAPTHRCIAPDLIGMGKSDKPDLGYFFDDHVRFMDAFIEALGLEEVVLVIHDWGSALGFHWAKRNPERVKGIAFMEFIRPIPTWDEWPEFARETFQAFRTTDVGRKLIIDQNVFIEGTLPMGVVRPLTEVEMDHYREPFLNPVDREPLWRFPNELPIAGEPANIVALVEEYMDWLHQSPVPKLLFWGTPGVLIPPAAAARLAKSLPNCKAVDIGPGLNLLQEDNPDLIGSEIARWLSTLEISG

SEQ ID NO: 2555 - protein, 277 aa, Synthetic construct
MFHYVDVGPRDGTPVLFLHGNPTSSYVWRNIIPHVAPTHRCIAPDLIGMGKSDKPDLGYFFDDHVRFMDAFIEALGLEEVVLVIHDWGSALGFHWAKRNPERVKGIAFMEFIRPIPTWDEWPEFARETFQAFRTTDVGRKLIIDQNVFIEGTLPMGVVRPLTEVEMDHYREPFLNPVDREPLWRFPNELPIAGEPANIVALVEEYMDWLHQSPVPKLLFWGTPGVLIPPAVAARLAKSLPNCKAVDIGPGLNLLQEDNPDLIGSEIARWLSTLEISG

SEQ ID NO: 2556 - protein, 277 aa, Synthetic construct
MFHYVDVGPRDGTPVLFLHGNPTSSYVWRNIIPHVAPTHRCIAPDLIGMGKSDKPDLGYFFDDHVRFMDAFIEALGLEEVVLVIHDWGSALGFHWAKRNPERVKGIAFMEFIRPIPTWDEWPEFARETFQAFRTTDVGRKLIIDQNVFIEGTLPMGVVRPLTEVEMDHYREPFLNPVDREPLWRFPNELPIAGEPANIVALVEEYMDWLHQSPVPKLLFWGTPGVLIPPALAARLAKSLPNCKAVDIGPGLNLLQEDNPDLIGSEIARWLSTLEISG

SEQ ID NO: 2557 - protein, 277 aa, Synthetic construct
MFHYVDVGPRDGTPVLFLHGNPTSSYVWRNIIPHVAPTHRCIAPDLIGMGKSDKPDLGYFFDDHVRFMDAFIEALGLEEVVLVIHDWGSALGFHWAKRNPERVKGIAFMEFIRPIPTWDEWPEFARETFQAFRTTDVGRKLIIDQNVFIEGTLPMGVVRPLTEVEMDHYREPFLNPVDREPLWRFPNELPIAGEPANIVALVEEYMDWLHQSPVPKLLFWGTPGVLIPPAFAARLAKSLPNCKAVDIGPGLNLLQEDNPDLIGSEIARWLSTLEISG

SEQ ID NO: 2558 - protein, 277 aa, Synthetic construct
MFHYVDVGPRDGTPVLFLHGNPTSSYVWRNIIPHVAPTHRCIAPDLIGMGKSDKPDLGYFFDDHVRFMDAFIEALGLEEVVLVIHDWGSALGFHWAKRNPERVKGIAFMEFIRPIPTWDEWPEFARETFQAFRTTDVGRKLIIDQNVFIEGTLPMGVVRPLTEVEMDHYREPFLNPVDREPLWRFPNELPIAGEPANIVALVEEYMDWLHQSPVPKLLFWGTPGVLIPPAIAARLAKSLPNCKAVDIGPGLNLLQEDNPDLIGSEIARWLSTLEISG

SEQ ID NO: 2559 - protein, 277 aa, Synthetic construct
MFHYVDVGPRDGTPVLFLHGNPTSSYVWRNIIPHVAPTHRCIAPDLIGMGKSDKPDLGYFFDDHVRFMDAFIEALGLEEVVLVIHDWGSALGFHWAKRNPERVKGIAFMEFIRPIPTWDEWPEFARETFQAFRTTDVGRKLIIDQNVFIEGTLPMGVVRPLTEVEMDHYREPFLNPVDREPLWRFPNELPIAGEPANIVALVEEYMDWLHQSPVPKLLFWGTPGVLIPPATAARLAKSLPNCKAVDIGPGLNLLQEDNPDLIGSEIARWLSTLEISG

SEQ ID NO: 2560 - protein, 277 aa, Synthetic construct
MFHYVDVGPRDGTPVLFLHGNPTSSYVWRNIIPHVAPTHRCIAPDLIGMGKSDKPDLGYFFDDHVRFMDAFIEALGLEEVVLVIHDWGSALGFHWAKRNPERVKGIAFMEFIRPIPTWDEWPEFARETFQAFRTTDVGRKLIIDQNVFIEGTLPMGVVRPLTEVEMDHYREPFLNPVDREPLWRFPNELPIAGEPANIVALVEEYMDWLHQSPVPKLLFWGTPGVLIPPAEVARLAKSLPNCKAVDIGPGLNLLQEDNPDLIGSEIARWLSTLEISG

SEQ ID NO: 2561 - protein, 277 aa, Synthetic construct
MFHYVDVGPRDGTPVLFLHGNPTSSYVWRNIIPHVAPTHRCIAPDLIGMGKSDKPDLGYFFDDHVRFMDAFIEALGLEEVVLVIHDWGSALGFHWAKRNPERVKGIAFMEFIRPIPTWDEWPEFARETFQAFRTTDVGRKLIIDQNVFIEGTLPMGVVRPLTEVEMDHYREPFLNPVDREPLWRFPNELPIAGEPANIVALVEEYMDWLHQSPVPKLLFWGTPGVLIPPAEMARLAKSLPNCKAVDIGPGLNLLQEDNPDLIGSEIARWLSTLEISG

SEQ ID NO: 2562 - protein, 277 aa, Synthetic construct
MFHYVDVGPRDGTPVLFLHGNPTSSYVWRNIIPHVAPTHRCIAPDLIGMGKSDKPDLGYFFDDHVRFMDAFIEALGLEEVVLVIHDWGSALGFHWAKRNPERVKGIAFMEFIRPIPTWDEWPEFARETFQAFRTTDVGRKLIIDQNVFIEGTLPMGVVRPLTEVEMDHYREPFLNPVDREPLWRFPNELPIAGEPANIVALVEEYMDWLHQSPVPKLLFWGTPGVLIPPAEGARLAKSLPNCKAVDIGPGLNLLQEDNPDLIGSEIARWLSTLEISG

SEQ ID NO: 2563 - protein, 277 aa, Synthetic construct
MFHYVDVGPRDGTPVLFLHGNPTSSYVWRNIIPHVAPTHRCIAPDLIGMGKSDKPDLGYFFDDHVRFMDAFIEALGLEEVVLVIHDWGSALGFHWAKRNPERVKGIAFMEFIRPIPTWDEWPEFARETFQAFRTTDVGRKLIIDQNVFIEGTLPMGVVRPLTEVEMDHYREPFLNPVDREPLWRFPNELPIAGEPANIVALVEEYMDWLHQSPVPKLLFWGTPGVLIPPAETARLAKSLPNCKAVDIGPGLNLLQEDNPDLIGSEIARWLSTLEISG

SEQ ID NO: 2564 - protein, 277 aa, Synthetic construct
MFHYVDVGPRDGTPVLFLHGNPTSSYVWRNIIPHVAPTHRCIAPDLIGMGKSDKPDLGYFFDDHVRFMDAFIEALGLEEVVLVIHDWGSALGFHWAKRNPERVKGIAFMEFIRPIPTWDEWPEFARETFQAFRTTDVGRKLIIDQNVFIEGTLPMGVVRPLTEVEMDHYREPFLNPVDREPLWRFPNELPIAGEPANIVALVEEYMDWLHQSPVPKLLFWGTPGVLIPPAELARLAKSLPNCKAVDIGPGLNLLQEDNPDLIGSEIARWLSTLEISG

SEQ ID NO: 2565 - protein, 277 aa, Synthetic construct
MFHYVDVGPRDGTPVLFLHGNPTSSYVWRNIIPHVAPTHRCIAPDLIGMGKSDKPDLGYFFDDHVRFMDAFIEALGLEEVVLVIHDWGSALGFHWAKRNPERVKGIAFMEFIRPIPTWDEWPEFARETFQAFRTTDVGRKLIIDQNVFIEGTLPMGVVRPLTEVEMDHYREPFLNPVDREPLWRFPNELPIAGEPANIVALVEEYMDWLHQSPVPKLLFWGTPGVLIPPAERARLAKSLPNCKAVDIGPGLNLLQEDNPDLIGSEIARWLSTLEISG

SEQ ID NO: 2566 - protein, 277 aa, Synthetic construct
MFHYVDVGPRDGTPVLFLHGNPTSSYVWRNIIPHVAPTHRCIAPDLIGMGKSDKPDLGYFFDDHVRFMDAFIEALGLEEVVLVIHDWGSALGFHWAKRNPERVKGIAFMEFIRPIPTWDEWPEFARETFQAFRTTDVGRKLIIDQNVFIEGTLPMGVVRPLTEVEMDHYREPFLNPVDREPLWRFPNELPIAGEPANIVALVEEYMDWLHQSPVPKLLFWGTPGVLIPPAEAERLAKSLPNCKAVDIGPGLNLLQEDNPDLIGSEIARWLSTLEISG

SEQ ID NO: 2567 - protein, 277 aa, Synthetic construct
MFHYVDVGPRDGTPVLFLHGNPTSSYVWRNIIPHVAPTHRCIAPDLIGMGKSDKPDLGYFFDDHVRFMDAFIEALGLEEVVLVIHDWGSALGFHWAKRNPERVKGIAFMEFIRPIPTWDEWPEFARETFQAFRTTDVGRKLIIDQNVFIEGTLPMGVVRPLTEVEMDHYREPFLNPVDREPLWRFPNELPIAGEPANIVALVEEYMDWLHQSPVPKLLFWGTPGVLIPPAEARRLAKSLPNCKAVDIGPGLNLLQEDNPDLIGSEIARWLSTLEISG

SEQ ID NO: 2568 - protein, 277 aa, Synthetic construct
MFHYVDVGPRDGTPVLFLHGNPTSSYVWRNIIPHVAPTHRCIAPDLIGMGKSDKPDLGYFFDDHVRFMDAFIEALGLEEVVLVIHDWGSALGFHWAKRNPERVKGIAFMEFIRPIPTWDEWPEFARETFQAFRTTDVGRKLIIDQNVFIEGTLPMGVVRPLTEVEMDHYREPFLNPVDREPLWRFPNELPIAGEPANIVALVEEYMDWLHQSPVPKLLFWGTPGVLIPPAEADRLAKSLPNCKAVDIGPGLNLLQEDNPDLIGSEIARWLSTLEISG

SEQ ID NO: 2569 - protein, 277 aa, Synthetic construct
MFHYVDVGPRDGTPVLFLHGNPTSSYVWRNIIPHVAPTHRCIAPDLIGMGKSDKPDLGYFFDDHVRFMDAFIEALGLEEVVLVIHDWGSALGFHWAKRNPERVKGIAFMEFIRPIPTWDEWPEFARETFQAFRTTDVGRKLIIDQNVFIEGTLPMGVVRPLTEVEMDHYREPFLNPVDREPLWRFPNELPIAGEPANIVALVEEYMDWLHQSPVPKLLFWGTPGVLIPPAEAQRLAKSLPNCKAVDIGPGLNLLQEDNPDLIGSEIARWLSTLEISG

SEQ ID NO: 2570 - protein, 277 aa, Synthetic construct
MFHYVDVGPRDGTPVLFLHGNPTSSYVWRNIIPHVAPTHRCIAPDLIGMGKSDKPDLGYFFDDHVRFMDAFIEALGLEEVVLVIHDWGSALGFHWAKRNPERVKGIAFMEFIRPIPTWDEWPEFARETFQAFRTTDVGRKLIIDQNVFIEGTLPMGVVRPLTEVEMDHYREPFLNPVDREPLWRFPNELPIAGEPANIVALVEEYMDWLHQSPVPKLLFWGTPGVLIPPAEAKRLAKSLPNCKAVDIGPGLNLLQEDNPDLIGSEIARWLSTLEISG

SEQ ID NO: 2571 - protein, 277 aa, Synthetic construct
MFHYVDVGPRDGTPVLFLHGNPTSSYVWRNIIPHVAPTHRCIAPDLIGMGKSDKPDLGYFFDDHVRFMDAFIEALGLEEVVLVIHDWGSALGFHWAKRNPERVKGIAFMEFIRPIPTWDEWPEFARETFQAFRTTDVGRKLIIDQNVFIEGTLPMGVVRPLTEVEMDHYREPFLNPVDREPLWRFPNELPIAGEPANIVALVEEYMDWLHQSPVPKLLFWGTPGVLIPPAEATRLAKSLPNCKAVDIGPGLNLLQEDNPDLIGSEIARWLSTLEISG

SEQ ID NO: 2572 - protein, 277 aa, Synthetic construct
MFHYVDVGPRDGTPVLFLHGNPTSSYVWRNIIPHVAPTHRCIAPDLIGMGKSDKPDLGYFFDDHVRFMDAFIEALGLEEVVLVIHDWGSALGFHWAKRNPERVKGIAFMEFIRPIPTWDEWPEFARETFQAFRTTDVGRKLIIDQNVFIEGTLPMGVVRPLTEVEMDHYREPFLNPVDREPLWRFPNELPIAGEPANIVALVEEYMDWLHQSPVPKLLFWGTPGVLIPPAEAAWLAKSLPNCKAVDIGPGLNLLQEDNPDLIGSEIARWLSTLEISG

SEQ ID NO: 2573 - protein, 277 aa, Synthetic construct
MFHYVDVGPRDGTPVLFLHGNPTSSYVWRNIIPHVAPTHRCIAPDLIGMGKSDKPDLGYFFDDHVRFMDAFIEALGLEEVVLVIHDWGSALGFHWAKRNPERVKGIAFMEFIRPIPTWDEWPEFARETFQAFRTTDVGRKLIIDQNVFIEGTLPMGVVRPLTEVEMDHYREPFLNPVDREPLWRFPNELPIAGEPANIVALVEEYMDWLHQSPVPKLLFWGTPGVLIPPAEAAALAKSLPNCKAVDIGPGLNLLQEDNPDLIGSEIARWLSTLEISG

SEQ ID NO: 2574 - protein, 277 aa, Synthetic construct
MFHYVDVGPRDGTPVLFLHGNPTSSYVWRNIIPHVAPTHRCIAPDLIGMGKSDKPDLGYFFDDHVRFMDAFIEALGLEEVVLVIHDWGSALGFHWAKRNPERVKGIAFMEFIRPIPTWDEWPEFARETFQAFRTTDVGRKLIIDQNVFIEGTLPMGVVRPLTEVEMDHYREPFLNPVDREPLWRFPNELPIAGEPANIVALVEEYMDWLHQSPVPKLLFWGTPGVLIPPAEAAELAKSLPNCKAVDIGPGLNLLQEDNPDLIGSEIARWLSTLEISG

SEQ ID NO: 2575 - protein, 277 aa, Synthetic construct
MFHYVDVGPRDGTPVLFLHGNPTSSYVWRNIIPHVAPTHRCIAPDLIGMGKSDKPDLGYFFDDHVRFMDAFIEALGLEEVVLVIHDWGSALGFHWAKRNPERVKGIAFMEFIRPIPTWDEWPEFARETFQAFRTTDVGRKLIIDQNVFIEGTLPMGVVRPLTEVEMDHYREPFLNPVDREPLWRFPNELPIAGEPANIVALVEEYMDWLHQSPVPKLLFWGTPGVLIPPAEAADLAKSLPNCKAVDIGPGLNLLQEDNPDLIGSEIARWLSTLEISG

SEQ ID NO: 2576 - protein, 277 aa, Synthetic construct
MFHYVDVGPRDGTPVLFLHGNPTSSYVWRNIIPHVAPTHRCIAPDLIGMGKSDKPDLGYFFDDHVRFMDAFIEALGLEEVVLVIHDWGSALGFHWAKRNPERVKGIAFMEFIRPIPTWDEWPEFARETFQAFRTTDVGRKLIIDQNVFIEGTLPMGVVRPLTEVEMDHYREPFLNPVDREPLWRFPNELPIAGEPANIVALVEEYMDWLHQSPVPKLLFWGTPGVLIPPAEAAYLAKSLPNCKAVDIGPGLNLLQEDNPDLIGSEIARWLSTLEISG

SEQ ID NO: 2577 - protein, 277 aa, Synthetic construct
MFHYVDVGPRDGTPVLFLHGNPTSSYVWRNIIPHVAPTHRCIAPDLIGMGKSDKPDLGYFFDDHVRFMDAFIEALGLEEVVLVIHDWGSALGFHWAKRNPERVKGIAFMEFIRPIPTWDEWPEFARETFQAFRTTDVGRKLIIDQNVFIEGTLPMGVVRPLTEVEMDHYREPFLNPVDREPLWRFPNELPIAGEPANIVALVEEYMDWLHQSPVPKLLFWGTPGVLIPPAEAAFLAKSLPNCKAVDIGPGLNLLQEDNPDLIGSEIARWLSTLEISG

SEQ ID NO: 2578 - protein, 277 aa, Synthetic construct
MFHYVDVGPRDGTPVLFLHGNPTSSYVWRNIIPHVAPTHRCIAPDLIGMGKSDKPDLGYFFDDHVRFMDAFIEALGLEEVVLVIHDWGSALGFHWAKRNPERVKGIAFMEFIRPIPTWDEWPEFARETFQAFRTTDVGRKLIIDQNVFIEGTLPMGVVRPLTEVEMDHYREPFLNPVDREPLWRFPNELPIAGEPANIVALVEEYMDWLHQSPVPKLLFWGTPGVLIPPAEAARFAKSLPNCKAVDIGPGLNLLQEDNPDLIGSEIARWLSTLEISG

SEQ ID NO: 2579 - protein, 277 aa, Synthetic construct
MFHYVDVGPRDGTPVLFLHGNPTSSYVWRNIIPHVAPTHRCIAPDLIGMGKSDKPDLGYFFDDHVRFMDAFIEALGLEEVVLVIHDWGSALGFHWAKRNPERVKGIAFMEFIRPIPTWDEWPEFARETFQAFRTTDVGRKLIIDQNVFIEGTLPMGVVRPLTEVEMDHYREPFLNPVDREPLWRFPNELPIAGEPANIVALVEEYMDWLHQSPVPKLLFWGTPGVLIPPAEAARIAKSLPNCKAVDIGPGLNLLQEDNPDLIGSEIARWLSTLEISG

SEQ ID NO: 2580 - protein, 277 aa, Synthetic construct
MFHYVDVGPRDGTPVLFLHGNPTSSYVWRNIIPHVAPTHRCIAPDLIGMGKSDKPDLGYFFDDHVRFMDAFIEALGLEEVVLVIHDWGSALGFHWAKRNPERVKGIAFMEFIRPIPTWDEWPEFARETFQAFRTTDVGRKLIIDQNVFIEGTLPMGVVRPLTEVEMDHYREPFLNPVDREPLWRFPNELPIAGEPANIVALVEEYMDWLHQSPVPKLLFWGTPGVLIPPAEAARWAKSLPNCKAVDIGPGLNLLQEDNPDLIGSEIARWLSTLEISG

SEQ ID NO: 2581 - protein, 277 aa, Synthetic construct
MFHYVDVGPRDGTPVLFLHGNPTSSYVWRNIIPHVAPTHRCIAPDLIGMGKSDKPDLGYFFDDHVRFMDAFIEALGLEEVVLVIHDWGSALGFHWAKRNPERVKGIAFMEFIRPIPTWDEWPEFARETFQAFRTTDVGRKLIIDQNVFIEGTLPMGVVRPLTEVEMDHYREPFLNPVDREPLWRFPNELPIAGEPANIVALVEEYMDWLHQSPVPKLLFWGTPGVLIPPAEAARYAKSLPNCKAVDIGPGLNLLQEDNPDLIGSEIARWLSTLEISG

SEQ ID NO: 2582 - protein, 277 aa, Synthetic construct
MFHYVDVGPRDGTPVLFLHGNPTSSYVWRNIIPHVAPTHRCIAPDLIGMGKSDKPDLGYFFDDHVRFMDAFIEALGLEEVVLVIHDWGSALGFHWAKRNPERVKGIAFMEFIRPIPTWDEWPEFARETFQAFRTTDVGRKLIIDQNVFIEGTLPMGVVRPLTEVEMDHYREPFLNPVDREPLWRFPNELPIAGEPANIVALVEEYMDWLHQSPVPKLLFWGTPGVLIPPAEAARVAKSLPNCKAVDIGPGLNLLQEDNPDLIGSEIARWLSTLEISG

SEQ ID NO: 2583 - protein, 277 aa, Synthetic construct
MFHYVDVGPRDGTPVLFLHGNPTSSYVWRNIIPHVAPTHRCIAPDLIGMGKSDKPDLGYFFDDHVRFMDAFIEALGLEEVVLVIHDWGSALGFHWAKRNPERVKGIAFMEFIRPIPTWDEWPEFARETFQAFRTTDVGRKLIIDQNVFIEGTLPMGVVRPLTEVEMDHYREPFLNPVDREPLWRFPNELPIAGEPANIVALVEEYMDWLHQSPVPKLLFWGTPGVLIPPAEAARMAKSLPNCKAVDIGPGLNLLQEDNPDLIGSEIARWLSTLEISG

SEQ ID NO: 2584 - protein, 277 aa, Synthetic construct
MFHYVDVGPRDGTPVLFLHGNPTSSYVWRNIIPHVAPTHRCIAPDLIGMGKSDKPDLGYFFDDHVRFMDAFIEALGLEEVVLVIHDWGSALGFHWAKRNPERVKGIAFMEFIRPIPTWDEWPEFARETFQAFRTTDVGRKLIIDQNVFIEGTLPMGVVRPLTEVEMDHYREPFLNPVDREPLWRFPNELPIAGEPANIVALVEEYMDWLHQSPVPKLLFWGTPGVLIPPAEAARLRKSLPNCKAVDIGPGLNLLQEDNPDLIGSEIARWLSTLEISG

SEQ ID NO: 2585 - protein, 277 aa, Synthetic construct
MFHYVDVGPRDGTPVLFLHGNPTSSYVWRNIIPHVAPTHRCIAPDLIGMGKSDKPDLGYFFDDHVRFMDAFIEALGLEEVVLVIHDWGSALGFHWAKRNPERVKGIAFMEFIRPIPTWDEWPEFARETFQAFRTTDVGRKLIIDQNVFIEGTLPMGVVRPLTEVEMDHYREPFLNPVDREPLWRFPNELPIAGEPANIVALVEEYMDWLHQSPVPKLLFWGTPGVLIPPAEAARLVKSLPNCKAVDIGPGLNLLQEDNPDLIGSEIARWLSTLEISG

SEQ ID NO: 2586 - protein, 277 aa, Synthetic construct
MFHYVDVGPRDGTPVLFLHGNPTSSYVWRNIIPHVAPTHRCIAPDLIGMGKSDKPDLGYFFDDHVRFMDAFIEALGLEEVVLVIHDWGSALGFHWAKRNPERVKGIAFMEFIRPIPTWDEWPEFARETFQAFRTTDVGRKLIIDQNVFIEGTLPMGVVRPLTEVEMDHYREPFLNPVDREPLWRFPNELPIAGEPANIVALVEEYMDWLHQSPVPKLLFWGTPGVLIPPAEAARLQKSLPNCKAVDIGPGLNLLQEDNPDLIGSEIARWLSTLEISG

SEQ ID NO: 2587 - protein, 277 aa, Synthetic construct
MFHYVDVGPRDGTPVLFLHGNPTSSYVWRNIIPHVAPTHRCIAPDLIGMGKSDKPDLGYFFDDHVRFMDAFIEALGLEEVVLVIHDWGSALGFHWAKRNPERVKGIAFMEFIRPIPTWDEWPEFARETFQAFRTTDVGRKLIIDQNVFIEGTLPMGVVRPLTEVEMDHYREPFLNPVDREPLWRFPNELPIAGEPANIVALVEEYMDWLHQSPVPKLLFWGTPGVLIPPAEAARLEKSLPNCKAVDIGPGLNLLQEDNPDLIGSEIARWLSTLEISG

SEQ ID NO: 2588 - protein, 277 aa, Synthetic construct
MFHYVDVGPRDGTPVLFLHGNPTSSYVWRNIIPHVAPTHRCIAPDLIGMGKSDKPDLGYFFDDHVRFMDAFIEALGLEEVVLVIHDWGSALGFHWAKRNPERVKGIAFMEFIRPIPTWDEWPEFARETFQAFRTTDVGRKLIIDQNVFIEGTLPMGVVRPLTEVEMDHYREPFLNPVDREPLWRFPNELPIAGEPANIVALVEEYMDWLHQSPVPKLLFWGTPGVLIPPAEAARLKKSLPNCKAVDIGPGLNLLQEDNPDLIGSEIARWLSTLEISG

SEQ ID NO: 2589 - protein, 277 aa, Synthetic construct
MFHYVDVGPRDGTPVLFLHGNPTSSYVWRNIIPHVAPTHRCIAPDLIGMGKSDKPDLGYFFDDHVRFMDAFIEALGLEEVVLVIHDWGSALGFHWAKRNPERVKGIAFMEFIRPIPTWDEWPEFARETFQAFRTTDVGRKLIIDQNVFIEGTLPMGVVRPLTEVEMDHYREPFLNPVDREPLWRFPNELPIAGEPANIVALVEEYMDWLHQSPVPKLLFWGTPGVLIPPAEAARLSKSLPNCKAVDIGPGLNLLQEDNPDLIGSEIARWLSTLEISG

SEQ ID NO: 2590 - protein, 277 aa, Synthetic construct
MFHYVDVGPRDGTPVLFLHGNPTSSYVWRNIIPHVAPTHRCIAPDLIGMGKSDKPDLGYFFDDHVRFMDAFIEALGLEEVVLVIHDWGSALGFHWAKRNPERVKGIAFMEFIRPIPTWDEWPEFARETFQAFRTTDVGRKLIIDQNVFIEGTLPMGVVRPLTEVEMDHYREPFLNPVDREPLWRFPNELPIAGEPANIVALVEEYMDWLHQSPVPKLLFWGTPGVLIPPAEAARLAESLPNCKAVDIGPGLNLLQEDNPDLIGSEIARWLSTLEISG

SEQ ID NO: 2591 - protein, 277 aa, Synthetic construct
MFHYVDVGPRDGTPVLFLHGNPTSSYVWRNIIPHVAPTHRCIAPDLIGMGKSDKPDLGYFFDDHVRFMDAFIEALGLEEVVLVIHDWGSALGFHWAKRNPERVKGIAFMEFIRPIPTWDEWPEFARETFQAFRTTDVGRKLIIDQNVFIEGTLPMGVVRPLTEVEMDHYREPFLNPVDREPLWRFPNELPIAGEPANIVALVEEYMDWLHQSPVPKLLFWGTPGVLIPPAEAARLAASLPNCKAVDIGPGLNLLQEDNPDLIGSEIARWLSTLEISG

SEQ ID NO: 2592 - protein, 277 aa, Synthetic construct
MFHYVDVGPRDGTPVLFLHGNPTSSYVWRNIIPHVAPTHRCIAPDLIGMGKSDKPDLGYFFDDHVRFMDAFIEALGLEEVVLVIHDWGSALGFHWAKRNPERVKGIAFMEFIRPIPTWDEWPEFARETFQAFRTTDVGRKLIIDQNVFIEGTLPMGVVRPLTEVEMDHYREPFLNPVDREPLWRFPNELPIAGEPANIVALVEEYMDWLHQSPVPKLLFWGTPGVLIPPAEAARLADSLPNCKAVDIGPGLNLLQEDNPDLIGSEIARWLSTLEISG

SEQ ID NO: 2593 - protein, 277 aa, Synthetic construct
MFHYVDVGPRDGTPVLFLHGNPTSSYVWRNIIPHVAPTHRCIAPDLIGMGKSDKPDLGYFFDDHVRFMDAFIEALGLEEVVLVIHDWGSALGFHWAKRNPERVKGIAFMEFIRPIPTWDEWPEFARETFQAFRTTDVGRKLIIDQNVFIEGTLPMGVVRPLTEVEMDHYREPFLNPVDREPLWRFPNELPIAGEPANIVALVEEYMDWLHQSPVPKLLFWGTPGVLIPPAEAARLAQSLPNCKAVDIGPGLNLLQEDNPDLIGSEIARWLSTLEISG

SEQ ID NO: 2594 - protein, 277 aa, Synthetic construct
MFHYVDVGPRDGTPVLFLHGNPTSSYVWRNIIPHVAPTHRCIAPDLIGMGKSDKPDLGYFFDDHVRFMDAFIEALGLEEVVLVIHDWGSALGFHWAKRNPERVKGIAFMEFIRPIPTWDEWPEFARETFQAFRTTDVGRKLIIDQNVFIEGTLPMGVVRPLTEVEMDHYREPFLNPVDREPLWRFPNELPIAGEPANIVALVEEYMDWLHQSPVPKLLFWGTPGVLIPPAEAARLARSLPNCKAVDIGPGLNLLQEDNPDLIGSEIARWLSTLEISG

SEQ ID NO: 2595 - protein, 277 aa, Synthetic construct
MFHYVDVGPRDGTPVLFLHGNPTSSYVWRNIIPHVAPTHRCIAPDLIGMGKSDKPDLGYFFDDHVRFMDAFIEALGLEEVVLVIHDWGSALGFHWAKRNPERVKGIAFMEFIRPIPTWDEWPEFARETFQAFRTTDVGRKLIIDQNVFIEGTLPMGVVRPLTEVEMDHYREPFLNPVDREPLWRFPNELPIAGEPANIVALVEEYMDWLHQSPVPKLLFWGTPGVLIPPAEAARLASSLPNCKAVDIGPGLNLLQEDNPDLIGSEIARWLSTLEISG

SEQ ID NO: 2596 - protein, 277 aa, Synthetic construct
MFHYVDVGPRDGTPVLFLHGNPTSSYVWRNIIPHVAPTHRCIAPDLIGMGKSDKPDLGYFFDDHVRFMDAFIEALGLEEVVLVIHDWGSALGFHWAKRNPERVKGIAFMEFIRPIPTWDEWPEFARETFQAFRTTDVGRKLIIDQNVFIEGTLPMGVVRPLTEVEMDHYREPFLNPVDREPLWRFPNELPIAGEPANIVALVEEYMDWLHQSPVPKLLFWGTPGVLIPPAEAARLAKTLPNCKAVDIGPGLNLLQEDNPDLIGSEIARWLSTLEISG

SEQ ID NO: 2597 - protein, 277 aa, Synthetic construct
MFHYVDVGPRDGTPVLFLHGNPTSSYVWRNIIPHVAPTHRCIAPDLIGMGKSDKPDLGYFFDDHVRFMDAFIEALGLEEVVLVIHDWGSALGFHWAKRNPERVKGIAFMEFIRPIPTWDEWPEFARETFQAFRTTDVGRKLIIDQNVFIEGTLPMGVVRPLTEVEMDHYREPFLNPVDREPLWRFPNELPIAGEPANIVALVEEYMDWLHQSPVPKLLFWGTPGVLIPPAEAARLAKDLPNCKAVDIGPGLNLLQEDNPDLIGSEIARWLSTLEISG

SEQ ID NO: 2598 - protein, 277 aa, Synthetic construct
MFHYVDVGPRDGTPVLFLHGNPTSSYVWRNIIPHVAPTHRCIAPDLIGMGKSDKPDLGYFFDDHVRFMDAFIEALGLEEVVLVIHDWGSALGFHWAKRNPERVKGIAFMEFIRPIPTWDEWPEFARETFQAFRTTDVGRKLIIDQNVFIEGTLPMGVVRPLTEVEMDHYREPFLNPVDREPLWRFPNELPIAGEPANIVALVEEYMDWLHQSPVPKLLFWGTPGVLIPPAEAARLAKALPNCKAVDIGPGLNLLQEDNPDLIGSEIARWLSTLEISG

SEQ ID NO: 2599 - protein, 277 aa, Synthetic construct
MFHYVDVGPRDGTPVLFLHGNPTSSYVWRNIIPHVAPTHRCIAPDLIGMGKSDKPDLGYFFDDHVRFMDAFIEALGLEEVVLVIHDWGSALGFHWAKRNPERVKGIAFMEFIRPIPTWDEWPEFARETFQAFRTTDVGRKLIIDQNVFIEGTLPMGVVRPLTEVEMDHYREPFLNPVDREPLWRFPNELPIAGEPANIVALVEEYMDWLHQSPVPKLLFWGTPGVLIPPAEAARLAKELPNCKAVDIGPGLNLLQEDNPDLIGSEIARWLSTLEISG

SEQ ID NO: 2600 - protein, 277 aa, Synthetic construct
MFHYVDVGPRDGTPVLFLHGNPTSSYVWRNIIPHVAPTHRCIAPDLIGMGKSDKPDLGYFFDDHVRFMDAFIEALGLEEVVLVIHDWGSALGFHWAKRNPERVKGIAFMEFIRPIPTWDEWPEFARETFQAFRTTDVGRKLIIDQNVFIEGTLPMGVVRPLTEVEMDHYREPFLNPVDREPLWRFPNELPIAGEPANIVALVEEYMDWLHQSPVPKLLFWGTPGVLIPPAEAARLAKLLPNCKAVDIGPGLNLLQEDNPDLIGSEIARWLSTLEISG

SEQ ID NO: 2601 - protein, 277 aa, Synthetic construct
MFHYVDVGPRDGTPVLFLHGNPTSSYVWRNIIPHVAPTHRCIAPDLIGMGKSDKPDLGYFFDDHVRFMDAFIEALGLEEVVLVIHDWGSALGFHWAKRNPERVKGIAFMEFIRPIPTWDEWPEFARETFQAFRTTDVGRKLIIDQNVFIEGTLPMGVVRPLTEVEMDHYREPFLNPVDREPLWRFPNELPIAGEPANIVALVEEYMDWLHQSPVPKLLFWGTPGVLIPPAEAARLAKVLPNCKAVDIGPGLNLLQEDNPDLIGSEIARWLSTLEISG

SEQ ID NO: 2602 - protein, 277 aa, Synthetic construct
MFHYVDVGPRDGTPVLFLHGNPTSSYVWRNIIPHVAPTHRCIAPDLIGMGKSDKPDLGYFFDDHVRFMDAFIEALGLEEVVLVIHDWGSALGFHWAKRNPERVKGIAFMEFIRPIPTWDEWPEFARETFQAFRTTDVGRKLIIDQNVFIEGTLPMGVVRPLTEVEMDHYREPFLNPVDREPLWRFPNELPIAGEPANIVALVEEYMDWLHQSPVPKLLFWGTPGVLIPPAEAARLAKSIPNCKAVDIGPGLNLLQEDNPDLIGSEIARWLSTLEISG

SEQ ID NO: 2603 - protein, 277 aa, Synthetic construct
MFHYVDVGPRDGTPVLFLHGNPTSSYVWRNIIPHVAPTHRCIAPDLIGMGKSDKPDLGYFFDDHVRFMDAFIEALGLEEVVLVIHDWGSALGFHWAKRNPERVKGIAFMEFIRPIPTWDEWPEFARETFQAFRTTDVGRKLIIDQNVFIEGTLPMGVVRPLTEVEMDHYREPFLNPVDREPLWRFPNELPIAGEPANIVALVEEYMDWLHQSPVPKLLFWGTPGVLIPPAEAARLAKSFPNCKAVDIGPGLNLLQEDNPDLIGSEIARWLSTLEISG

SEQ ID NO: 2604 - protein, 277 aa, Synthetic construct
MFHYVDVGPRDGTPVLFLHGNPTSSYVWRNIIPHVAPTHRCIAPDLIGMGKSDKPDLGYFFDDHVRFMDAFIEALGLEEVVLVIHDWGSALGFHWAKRNPERVKGIAFMEFIRPIPTWDEWPEFARETFQAFRTTDVGRKLIIDQNVFIEGTLPMGVVRPLTEVEMDHYREPFLNPVDREPLWRFPNELPIAGEPANIVALVEEYMDWLHQSPVPKLLFWGTPGVLIPPAEAARLAKSMPNCKAVDIGPGLNLLQEDNPDLIGSEIARWLSTLEISG

SEQ ID NO: 2605 - protein, 277 aa, Synthetic construct
MFHYVDVGPRDGTPVLFLHGNPTSSYVWRNIIPHVAPTHRCIAPDLIGMGKSDKPDLGYFFDDHVRFMDAFIEALGLEEVVLVIHDWGSALGFHWAKRNPERVKGIAFMEFIRPIPTWDEWPEFARETFQAFRTTDVGRKLIIDQNVFIEGTLPMGVVRPLTEVEMDHYREPFLNPVDREPLWRFPNELPIAGEPANIVALVEEYMDWLHQSPVPKLLFWGTPGVLIPPAEAARLAKSWPNCKAVDIGPGLNLLQEDNPDLIGSEIARWLSTLEISG

SEQ ID NO: 2606 - protein, 277 aa, Synthetic construct
MFHYVDVGPRDGTPVLFLHGNPTSSYVWRNIIPHVAPTHRCIAPDLIGMGKSDKPDLGYFFDDHVRFMDAFIEALGLEEVVLVIHDWGSALGFHWAKRNPERVKGIAFMEFIRPIPTWDEWPEFARETFQAFRTTDVGRKLIIDQNVFIEGTLPMGVVRPLTEVEMDHYREPFLNPVDREPLWRFPNELPIAGEPANIVALVEEYMDWLHQSPVPKLLFWGTPGVLIPPAEAARLAKSVPNCKAVDIGPGLNLLQEDNPDLIGSEIARWLSTLEISG

SEQ ID NO: 2607 - protein, 277 aa, Synthetic construct
MFHYVDVGPRDGTPVLFLHGNPTSSYVWRNIIPHVAPTHRCIAPDLIGMGKSDKPDLGYFFDDHVRFMDAFIEALGLEEVVLVIHDWGSALGFHWAKRNPERVKGIAFMEFIRPIPTWDEWPEFARETFQAFRTTDVGRKLIIDQNVFIEGTLPMGVVRPLTEVEMDHYREPFLNPVDREPLWRFPNELPIAGEPANIVALVEEYMDWLHQSPVPKLLFWGTPGVLIPPAEAARLAKSAPNCKAVDIGPGLNLLQEDNPDLIGSEIARWLSTLEISG

SEQ ID NO: 2608 - protein, 277 aa, Synthetic construct
MFHYVDVGPRDGTPVLFLHGNPTSSYVWRNIIPHVAPTHRCIAPDLIGMGKSDKPDLGYFFDDHVRFMDAFIEALGLEEVVLVIHDWGSALGFHWAKRNPERVKGIAFMEFIRPIPTWDEWPEFARETFQAFRTTDVGRKLIIDQNVFIEGTLPMGVVRPLTEVEMDHYREPFLNPVDREPLWRFPNELPIAGEPANIVALVEEYMDWLHQSPVPKLLFWGTPGVLIPPAEAARLAKSLTNCKAVDIGPGLNLLQEDNPDLIGSEIARWLSTLEISG

SEQ ID NO: 2609 - protein, 277 aa, Synthetic construct
MFHYVDVGPRDGTPVLFLHGNPTSSYVWRNIIPHVAPTHRCIAPDLIGMGKSDKPDLGYFFDDHVRFMDAFIEALGLEEVVLVIHDWGSALGFHWAKRNPERVKGIAFMEFIRPIPTWDEWPEFARETFQAFRTTDVGRKLIIDQNVFIEGTLPMGVVRPLTEVEMDHYREPFLNPVDREPLWRFPNELPIAGEPANIVALVEEYMDWLHQSPVPKLLFWGTPGVLIPPAEAARLAKSLANCKAVDIGPGLNLLQEDNPDLIGSEIARWLSTLEISG

SEQ ID NO: 2610 - protein, 277 aa, Synthetic construct
MFHYVDVGPRDGTPVLFLHGNPTSSYVWRNIIPHVAPTHRCIAPDLIGMGKSDKPDLGYFFDDHVRFMDAFIEALGLEEVVLVIHDWGSALGFHWAKRNPERVKGIAFMEFIRPIPTWDEWPEFARETFQAFRTTDVGRKLIIDQNVFIEGTLPMGVVRPLTEVEMDHYREPFLNPVDREPLWRFPNELPIAGEPANIVALVEEYMDWLHQSPVPKLLFWGTPGVLIPPAEAARLAKSLSNCKAVDIGPGLNLLQEDNPDLIGSEIARWLSTLEISG

SEQ ID NO: 2611 - protein, 277 aa, Synthetic construct
MFHYVDVGPRDGTPVLFLHGNPTSSYVWRNIIPHVAPTHRCIAPDLIGMGKSDKPDLGYFFDDHVRFMDAFIEALGLEEVVLVIHDWGSALGFHWAKRNPERVKGIAFMEFIRPIPTWDEWPEFARETFQAFRTTDVGRKLIIDQNVFIEGTLPMGVVRPLTEVEMDHYREPFLNPVDREPLWRFPNELPIAGEPANIVALVEEYMDWLHQSPVPKLLFWGTPGVLIPPAEAARLAKSLKNCKAVDIGPGLNLLQEDNPDLIGSEIARWLSTLEISG

SEQ ID NO: 2612 - protein, 277 aa, Synthetic construct
MFHYVDVGPRDGTPVLFLHGNPTSSYVWRNIIPHVAPTHRCIAPDLIGMGKSDKPDLGYFFDDHVRFMDAFIEALGLEEVVLVIHDWGSALGFHWAKRNPERVKGIAFMEFIRPIPTWDEWPEFARETFQAFRTTDVGRKLIIDQNVFIEGTLPMGVVRPLTEVEMDHYREPFLNPVDREPLWRFPNELPIAGEPANIVALVEEYMDWLHQSPVPKLLFWGTPGVLIPPAEAARLAKSLENCKAVDIGPGLNLLQEDNPDLIGSEIARWLSTLEISG

SEQ ID NO: 2613 - protein, 277 aa, Synthetic construct
MFHYVDVGPRDGTPVLFLHGNPTSSYVWRNIIPHVAPTHRCIAPDLIGMGKSDKPDLGYFFDDHVRFMDAFIEALGLEEVVLVIHDWGSALGFHWAKRNPERVKGIAFMEFIRPIPTWDEWPEFARETFQAFRTTDVGRKLIIDQNVFIEGTLPMGVVRPLTEVEMDHYREPFLNPVDREPLWRFPNELPIAGEPANIVALVEEYMDWLHQSPVPKLLFWGTPGVLIPPAEAARLAKSLDNCKAVDIGPGLNLLQEDNPDLIGSEIARWLSTLEISG

SEQ ID NO: 2614 - protein, 277 aa, Synthetic construct
MFHYVDVGPRDGTPVLFLHGNPTSSYVWRNIIPHVAPTHRCIAPDLIGMGKSDKPDLGYFFDDHVRFMDAFIEALGLEEVVLVIHDWGSALGFHWAKRNPERVKGIAFMEFIRPIPTWDEWPEFARETFQAFRTTDVGRKLIIDQNVFIEGTLPMGVVRPLTEVEMDHYREPFLNPVDREPLWRFPNELPIAGEPANIVALVEEYMDWLHQSPVPKLLFWGTPGVLIPPAEAARLAKSLPDCKAVDIGPGLNLLQEDNPDLIGSEIARWLSTLEISG

SEQ ID NO: 2615 - protein, 277 aa, Synthetic construct
MFHYVDVGPRDGTPVLFLHGNPTSSYVWRNIIPHVAPTHRCIAPDLIGMGKSDKPDLGYFFDDHVRFMDAFIEALGLEEVVLVIHDWGSALGFHWAKRNPERVKGIAFMEFIRPIPTWDEWPEFARETFQAFRTTDVGRKLIIDQNVFIEGTLPMGVVRPLTEVEMDHYREPFLNPVDREPLWRFPNELPIAGEPANIVALVEEYMDWLHQSPVPKLLFWGTPGVLIPPAEAARLAKSLPHCKAVDIGPGLNLLQEDNPDLIGSEIARWLSTLEISG

SEQ ID NO: 2616 - protein, 277 aa, Synthetic construct
MFHYVDVGPRDGTPVLFLHGNPTSSYVWRNIIPHVAPTHRCIAPDLIGMGKSDKPDLGYFFDDHVRFMDAFIEALGLEEVVLVIHDWGSALGFHWAKRNPERVKGIAFMEFIRPIPTWDEWPEFARETFQAFRTTDVGRKLIIDQNVFIEGTLPMGVVRPLTEVEMDHYREPFLNPVDREPLWRFPNELPIAGEPANIVALVEEYMDWLHQSPVPKLLFWGTPGVLIPPAEAARLAKSLPGCKAVDIGPGLNLLQEDNPDLIGSEIARWLSTLEISG

SEQ ID NO: 2617 - protein, 277 aa, Synthetic construct
MFHYVDVGPRDGTPVLFLHGNPTSSYVWRNIIPHVAPTHRCIAPDLIGMGKSDKPDLGYFFDDHVRFMDAFIEALGLEEVVLVIHDWGSALGFHWAKRNPERVKGIAFMEFIRPIPTWDEWPEFARETFQAFRTTDVGRKLIIDQNVFIEGTLPMGVVRPLTEVEMDHYREPFLNPVDREPLWRFPNELPIAGEPANIVALVEEYMDWLHQSPVPKLLFWGTPGVLIPPAEAARLAKSLPACKAVDIGPGLNLLQEDNPDLIGSEIARWLSTLEISG

SEQ ID NO: 2618 - protein, 277 aa, Synthetic construct
MFHYVDVGPRDGTPVLFLHGNPTSSYVWRNIIPHVAPTHRCIAPDLIGMGKSDKPDLGYFFDDHVRFMDAFIEALGLEEVVLVIHDWGSALGFHWAKRNPERVKGIAFMEFIRPIPTWDEWPEFARETFQAFRTTDVGRKLIIDQNVFIEGTLPMGVVRPLTEVEMDHYREPFLNPVDREPLWRFPNELPIAGEPANIVALVEEYMDWLHQSPVPKLLFWGTPGVLIPPAEAARLAKSLPQCKAVDIGPGLNLLQEDNPDLIGSEIARWLSTLEISG

SEQ ID NO: 2619 - protein, 277 aa, Synthetic construct
MFHYVDVGPRDGTPVLFLHGNPTSSYVWRNIIPHVAPTHRCIAPDLIGMGKSDKPDLGYFFDDHVRFMDAFIEALGLEEVVLVIHDWGSALGFHWAKRNPERVKGIAFMEFIRPIPTWDEWPEFARETFQAFRTTDVGRKLIIDQNVFIEGTLPMGVVRPLTEVEMDHYREPFLNPVDREPLWRFPNELPIAGEPANIVALVEEYMDWLHQSPVPKLLFWGTPGVLIPPAEAARLAKSLPSCKAVDIGPGLNLLQEDNPDLIGSEIARWLSTLEISG

SEQ ID NO: 2620 - protein, 277 aa, Synthetic construct
MFHYVDVGPRDGTPVLFLHGNPTSSYVWRNIIPHVAPTHRCIAPDLIGMGKSDKPDLGYFFDDHVRFMDAFIEALGLEEVVLVIHDWGSALGFHWAKRNPERVKGIAFMEFIRPIPTWDEWPEFARETFQAFRTTDVGRKLIIDQNVFIEGTLPMGVVRPLTEVEMDHYREPFLNPVDREPLWRFPNELPIAGEPANIVALVEEYMDWLHQSPVPKLLFWGTPGVLIPPAEAARLAKSLPNLKAVDIGPGLNLLQEDNPDLIGSEIARWLSTLEISG

SEQ ID NO: 2621 - protein, 277 aa, Synthetic construct
MFHYVDVGPRDGTPVLFLHGNPTSSYVWRNIIPHVAPTHRCIAPDLIGMGKSDKPDLGYFFDDHVRFMDAFIEALGLEEVVLVIHDWGSALGFHWAKRNPERVKGIAFMEFIRPIPTWDEWPEFARETFQAFRTTDVGRKLIIDQNVFIEGTLPMGVVRPLTEVEMDHYREPFLNPVDREPLWRFPNELPIAGEPANIVALVEEYMDWLHQSPVPKLLFWGTPGVLIPPAEAARLAKSLPNVKAVDIGPGLNLLQEDNPDLIGSEIARWLSTLEISG

SEQ ID NO: 2622 - protein, 277 aa, Synthetic construct
MFHYVDVGPRDGTPVLFLHGNPTSSYVWRNIIPHVAPTHRCIAPDLIGMGKSDKPDLGYFFDDHVRFMDAFIEALGLEEVVLVIHDWGSALGFHWAKRNPERVKGIAFMEFIRPIPTWDEWPEFARETFQAFRTTDVGRKLIIDQNVFIEGTLPMGVVRPLTEVEMDHYREPFLNPVDREPLWRFPNELPIAGEPANIVALVEEYMDWLHQSPVPKLLFWGTPGVLIPPAEAARLAKSLPNAKAVDIGPGLNLLQEDNPDLIGSEIARWLSTLEISG

SEQ ID NO: 2623 - protein, 277 aa, Synthetic construct
MFHYVDVGPRDGTPVLFLHGNPTSSYVWRNIIPHVAPTHRCIAPDLIGMGKSDKPDLGYFFDDHVRFMDAFIEALGLEEVVLVIHDWGSALGFHWAKRNPERVKGIAFMEFIRPIPTWDEWPEFARETFQAFRTTDVGRKLIIDQNVFIEGTLPMGVVRPLTEVEMDHYREPFLNPVDREPLWRFPNELPIAGEPANIVALVEEYMDWLHQSPVPKLLFWGTPGVLIPPAEAARLAKSLPNIKAVDIGPGLNLLQEDNPDLIGSEIARWLSTLEISG

SEQ ID NO: 2624 - protein, 277 aa, Synthetic construct
MFHYVDVGPRDGTPVLFLHGNPTSSYVWRNIIPHVAPTHRCIAPDLIGMGKSDKPDLGYFFDDHVRFMDAFIEALGLEEVVLVIHDWGSALGFHWAKRNPERVKGIAFMEFIRPIPTWDEWPEFARETFQAFRTTDVGRKLIIDQNVFIEGTLPMGVVRPLTEVEMDHYREPFLNPVDREPLWRFPNELPIAGEPANIVALVEEYMDWLHQSPVPKLLFWGTPGVLIPPAEAARLAKSLPNMKAVDIGPGLNLLQEDNPDLIGSEIARWLSTLEISG

SEQ ID NO: 2625 - protein, 277 aa, Synthetic construct
MFHYVDVGPRDGTPVLFLHGNPTSSYVWRNIIPHVAPTHRCIAPDLIGMGKSDKPDLGYFFDDHVRFMDAFIEALGLEEVVLVIHDWGSALGFHWAKRNPERVKGIAFMEFIRPIPTWDEWPEFARETFQAFRTTDVGRKLIIDQNVFIEGTLPMGVVRPLTEVEMDHYREPFLNPVDREPLWRFPNELPIAGEPANIVALVEEYMDWLHQSPVPKLLFWGTPGVLIPPAEAARLAKSLPNQKAVDIGPGLNLLQEDNPDLIGSEIARWLSTLEISG

SEQ ID NO: 2626 - protein, 277 aa, Synthetic construct
MFHYVDVGPRDGTPVLFLHGNPTSSYVWRNIIPHVAPTHRCIAPDLIGMGKSDKPDLGYFFDDHVRFMDAFIEALGLEEVVLVIHDWGSALGFHWAKRNPERVKGIAFMEFIRPIPTWDEWPEFARETFQAFRTTDVGRKLIIDQNVFIEGTLPMGVVRPLTEVEMDHYREPFLNPVDREPLWRFPNELPIAGEPANIVALVEEYMDWLHQSPVPKLLFWGTPGVLIPPAEAARLAKSLPNCTAVDIGPGLNLLQEDNPDLIGSEIARWLSTLEISG

SEQ ID NO: 2627 - protein, 277 aa, Synthetic construct
MFHYVDVGPRDGTPVLFLHGNPTSSYVWRNIIPHVAPTHRCIAPDLIGMGKSDKPDLGYFFDDHVRFMDAFIEALGLEEVVLVIHDWGSALGFHWAKRNPERVKGIAFMEFIRPIPTWDEWPEFARETFQAFRTTDVGRKLIIDQNVFIEGTLPMGVVRPLTEVEMDHYREPFLNPVDREPLWRFPNELPIAGEPANIVALVEEYMDWLHQSPVPKLLFWGTPGVLIPPAEAARLAKSLPNCEAVDIGPGLNLLQEDNPDLIGSEIARWLSTLEISG

SEQ ID NO: 2628 - protein, 277 aa, Synthetic construct
MFHYVDVGPRDGTPVLFLHGNPTSSYVWRNIIPHVAPTHRCIAPDLIGMGKSDKPDLGYFFDDHVRFMDAFIEALGLEEVVLVIHDWGSALGFHWAKRNPERVKGIAFMEFIRPIPTWDEWPEFARETFQAFRTTDVGRKLIIDQNVFIEGTLPMGVVRPLTEVEMDHYREPFLNPVDREPLWRFPNELPIAGEPANIVALVEEYMDWLHQSPVPKLLFWGTPGVLIPPAEAARLAKSLPNCRAVDIGPGLNLLQEDNPDLIGSEIARWLSTLEISG

SEQ ID NO: 2629 - protein, 277 aa, Synthetic construct
MFHYVDVGPRDGTPVLFLHGNPTSSYVWRNIIPHVAPTHRCIAPDLIGMGKSDKPDLGYFFDDHVRFMDAFIEALGLEEVVLVIHDWGSALGFHWAKRNPERVKGIAFMEFIRPIPTWDEWPEFARETFQAFRTTDVGRKLIIDQNVFIEGTLPMGVVRPLTEVEMDHYREPFLNPVDREPLWRFPNELPIAGEPANIVALVEEYMDWLHQSPVPKLLFWGTPGVLIPPAEAARLAKSLPNCQAVDIGPGLNLLQEDNPDLIGSEIARWLSTLEISG

SEQ ID NO: 2630 - protein, 277 aa, Synthetic construct
MFHYVDVGPRDGTPVLFLHGNPTSSYVWRNIIPHVAPTHRCIAPDLIGMGKSDKPDLGYFFDDHVRFMDAFIEALGLEEVVLVIHDWGSALGFHWAKRNPERVKGIAFMEFIRPIPTWDEWPEFARETFQAFRTTDVGRKLIIDQNVFIEGTLPMGVVRPLTEVEMDHYREPFLNPVDREPLWRFPNELPIAGEPANIVALVEEYMDWLHQSPVPKLLFWGTPGVLIPPAEAARLAKSLPNCSAVDIGPGLNLLQEDNPDLIGSEIARWLSTLEISG

SEQ ID NO: 2631 - protein, 277 aa, Synthetic construct
MFHYVDVGPRDGTPVLFLHGNPTSSYVWRNIIPHVAPTHRCIAPDLIGMGKSDKPDLGYFFDDHVRFMDAFIEALGLEEVVLVIHDWGSALGFHWAKRNPERVKGIAFMEFIRPIPTWDEWPEFARETFQAFRTTDVGRKLIIDQNVFIEGTLPMGVVRPLTEVEMDHYREPFLNPVDREPLWRFPNELPIAGEPANIVALVEEYMDWLHQSPVPKLLFWGTPGVLIPPAEAARLAKSLPNCVAVDIGPGLNLLQEDNPDLIGSEIARWLSTLEISG

SEQ ID NO: 2632 - protein, 277 aa, Synthetic construct
MFHYVDVGPRDGTPVLFLHGNPTSSYVWRNIIPHVAPTHRCIAPDLIGMGKSDKPDLGYFFDDHVRFMDAFIEALGLEEVVLVIHDWGSALGFHWAKRNPERVKGIAFMEFIRPIPTWDEWPEFARETFQAFRTTDVGRKLIIDQNVFIEGTLPMGVVRPLTEVEMDHYREPFLNPVDREPLWRFPNELPIAGEPANIVALVEEYMDWLHQSPVPKLLFWGTPGVLIPPAEAARLAKSLPNCKVVDIGPGLNLLQEDNPDLIGSEIARWLSTLEISG

SEQ ID NO: 2633 - protein, 277 aa, Synthetic construct
MFHYVDVGPRDGTPVLFLHGNPTSSYVWRNIIPHVAPTHRCIAPDLIGMGKSDKPDLGYFFDDHVRFMDAFIEALGLEEVVLVIHDWGSALGFHWAKRNPERVKGIAFMEFIRPIPTWDEWPEFARETFQAFRTTDVGRKLIIDQNVFIEGTLPMGVVRPLTEVEMDHYREPFLNPVDREPLWRFPNELPIAGEPANIVALVEEYMDWLHQSPVPKLLFWGTPGVLIPPAEAARLAKSLPNCKIVDIGPGLNLLQEDNPDLIGSEIARWLSTLEISG

SEQ ID NO: 2634 - protein, 277 aa, Synthetic construct
MFHYVDVGPRDGTPVLFLHGNPTSSYVWRNIIPHVAPTHRCIAPDLIGMGKSDKPDLGYFFDDHVRFMDAFIEALGLEEVVLVIHDWGSALGFHWAKRNPERVKGIAFMEFIRPIPTWDEWPEFARETFQAFRTTDVGRKLIIDQNVFIEGTLPMGVVRPLTEVEMDHYREPFLNPVDREPLWRFPNELPIAGEPANIVALVEEYMDWLHQSPVPKLLFWGTPGVLIPPAEAARLAKSLPNCKLVDIGPGLNLLQEDNPDLIGSEIARWLSTLEISG

SEQ ID NO: 2635 - protein, 277 aa, Synthetic construct
MFHYVDVGPRDGTPVLFLHGNPTSSYVWRNIIPHVAPTHRCIAPDLIGMGKSDKPDLGYFFDDHVRFMDAFIEALGLEEVVLVIHDWGSALGFHWAKRNPERVKGIAFMEFIRPIPTWDEWPEFARETFQAFRTTDVGRKLIIDQNVFIEGTLPMGVVRPLTEVEMDHYREPFLNPVDREPLWRFPNELPIAGEPANIVALVEEYMDWLHQSPVPKLLFWGTPGVLIPPAEAARLAKSLPNCKTVDIGPGLNLLQEDNPDLIGSEIARWLSTLEISG

SEQ ID NO: 2636 - protein, 277 aa, Synthetic construct
MFHYVDVGPRDGTPVLFLHGNPTSSYVWRNIIPHVAPTHRCIAPDLIGMGKSDKPDLGYFFDDHVRFMDAFIEALGLEEVVLVIHDWGSALGFHWAKRNPERVKGIAFMEFIRPIPTWDEWPEFARETFQAFRTTDVGRKLIIDQNVFIEGTLPMGVVRPLTEVEMDHYREPFLNPVDREPLWRFPNELPIAGEPANIVALVEEYMDWLHQSPVPKLLFWGTPGVLIPPAEAARLAKSLPNCKRVDIGPGLNLLQEDNPDLIGSEIARWLSTLEISG

SEQ ID NO: 2637 - protein, 277 aa, Synthetic construct
MFHYVDVGPRDGTPVLFLHGNPTSSYVWRNIIPHVAPTHRCIAPDLIGMGKSDKPDLGYFFDDHVRFMDAFIEALGLEEVVLVIHDWGSALGFHWAKRNPERVKGIAFMEFIRPIPTWDEWPEFARETFQAFRTTDVGRKLIIDQNVFIEGTLPMGVVRPLTEVEMDHYREPFLNPVDREPLWRFPNELPIAGEPANIVALVEEYMDWLHQSPVPKLLFWGTPGVLIPPAEAARLAKSLPNCKSVDIGPGLNLLQEDNPDLIGSEIARWLSTLEISG

SEQ ID NO: 2638 - protein, 277 aa, Synthetic construct
MFHYVDVGPRDGTPVLFLHGNPTSSYVWRNIIPHVAPTHRCIAPDLIGMGKSDKPDLGYFFDDHVRFMDAFIEALGLEEVVLVIHDWGSALGFHWAKRNPERVKGIAFMEFIRPIPTWDEWPEFARETFQAFRTTDVGRKLIIDQNVFIEGTLPMGVVRPLTEVEMDHYREPFLNPVDREPLWRFPNELPIAGEPANIVALVEEYMDWLHQSPVPKLLFWGTPGVLIPPAEAARLAKSLPNCKAIDIGPGLNLLQEDNPDLIGSEIARWLSTLEISG

SEQ ID NO: 2639 - protein, 277 aa, Synthetic construct
MFHYVDVGPRDGTPVLFLHGNPTSSYVWRNIIPHVAPTHRCIAPDLIGMGKSDKPDLGYFFDDHVRFMDAFIEALGLEEVVLVIHDWGSALGFHWAKRNPERVKGIAFMEFIRPIPTWDEWPEFARETFQAFRTTDVGRKLIIDQNVFIEGTLPMGVVRPLTEVEMDHYREPFLNPVDREPLWRFPNELPIAGEPANIVALVEEYMDWLHQSPVPKLLFWGTPGVLIPPAEAARLAKSLPNCKATDIGPGLNLLQEDNPDLIGSEIARWLSTLEISG

SEQ ID NO: 2640 - protein, 277 aa, Synthetic construct
MFHYVDVGPRDGTPVLFLHGNPTSSYVWRNIIPHVAPTHRCIAPDLIGMGKSDKPDLGYFFDDHVRFMDAFIEALGLEEVVLVIHDWGSALGFHWAKRNPERVKGIAFMEFIRPIPTWDEWPEFARETFQAFRTTDVGRKLIIDQNVFIEGTLPMGVVRPLTEVEMDHYREPFLNPVDREPLWRFPNELPIAGEPANIVALVEEYMDWLHQSPVPKLLFWGTPGVLIPPAEAARLAKSLPNCKAADIGPGLNLLQEDNPDLIGSEIARWLSTLEISG

SEQ ID NO: 2641 - protein, 277 aa, Synthetic construct
MFHYVDVGPRDGTPVLFLHGNPTSSYVWRNIIPHVAPTHRCIAPDLIGMGKSDKPDLGYFFDDHVRFMDAFIEALGLEEVVLVIHDWGSALGFHWAKRNPERVKGIAFMEFIRPIPTWDEWPEFARETFQAFRTTDVGRKLIIDQNVFIEGTLPMGVVRPLTEVEMDHYREPFLNPVDREPLWRFPNELPIAGEPANIVALVEEYMDWLHQSPVPKLLFWGTPGVLIPPAEAARLAKSLPNCKARDIGPGLNLLQEDNPDLIGSEIARWLSTLEISG

SEQ ID NO: 2642 - protein, 277 aa, Synthetic construct
MFHYVDVGPRDGTPVLFLHGNPTSSYVWRNIIPHVAPTHRCIAPDLIGMGKSDKPDLGYFFDDHVRFMDAFIEALGLEEVVLVIHDWGSALGFHWAKRNPERVKGIAFMEFIRPIPTWDEWPEFARETFQAFRTTDVGRKLIIDQNVFIEGTLPMGVVRPLTEVEMDHYREPFLNPVDREPLWRFPNELPIAGEPANIVALVEEYMDWLHQSPVPKLLFWGTPGVLIPPAEAARLAKSLPNCKALDIGPGLNLLQEDNPDLIGSEIARWLSTLEISG

SEQ ID NO: 2643 - protein, 277 aa, Synthetic construct
MFHYVDVGPRDGTPVLFLHGNPTSSYVWRNIIPHVAPTHRCIAPDLIGMGKSDKPDLGYFFDDHVRFMDAFIEALGLEEVVLVIHDWGSALGFHWAKRNPERVKGIAFMEFIRPIPTWDEWPEFARETFQAFRTTDVGRKLIIDQNVFIEGTLPMGVVRPLTEVEMDHYREPFLNPVDREPLWRFPNELPIAGEPANIVALVEEYMDWLHQSPVPKLLFWGTPGVLIPPAEAARLAKSLPNCKASDIGPGLNLLQEDNPDLIGSEIARWLSTLEISG

SEQ ID NO: 2644 - protein, 277 aa, Synthetic construct
MFHYVDVGPRDGTPVLFLHGNPTSSYVWRNIIPHVAPTHRCIAPDLIGMGKSDKPDLGYFFDDHVRFMDAFIEALGLEEVVLVIHDWGSALGFHWAKRNPERVKGIAFMEFIRPIPTWDEWPEFARETFQAFRTTDVGRKLIIDQNVFIEGTLPMGVVRPLTEVEMDHYREPFLNPVDREPLWRFPNELPIAGEPANIVALVEEYMDWLHQSPVPKLLFWGTPGVLIPPAEAARLAKSLPNCKAVEIGPGLNLLQEDNPDLIGSEIARWLSTLEISG

SEQ ID NO: 2645 - protein, 277 aa, Synthetic construct
MFHYVDVGPRDGTPVLFLHGNPTSSYVWRNIIPHVAPTHRCIAPDLIGMGKSDKPDLGYFFDDHVRFMDAFIEALGLEEVVLVIHDWGSALGFHWAKRNPERVKGIAFMEFIRPIPTWDEWPEFARETFQAFRTTDVGRKLIIDQNVFIEGTLPMGVVRPLTEVEMDHYREPFLNPVDREPLWRFPNELPIAGEPANIVALVEEYMDWLHQSPVPKLLFWGTPGVLIPPAEAARLAKSLPNCKAVTIGPGLNLLQEDNPDLIGSEIARWLSTLEISG

SEQ ID NO: 2646 - protein, 277 aa, Synthetic construct
MFHYVDVGPRDGTPVLFLHGNPTSSYVWRNIIPHVAPTHRCIAPDLIGMGKSDKPDLGYFFDDHVRFMDAFIEALGLEEVVLVIHDWGSALGFHWAKRNPERVKGIAFMEFIRPIPTWDEWPEFARETFQAFRTTDVGRKLIIDQNVFIEGTLPMGVVRPLTEVEMDHYREPFLNPVDREPLWRFPNELPIAGEPANIVALVEEYMDWLHQSPVPKLLFWGTPGVLIPPAEAARLAKSLPNCKAVPIGPGLNLLQEDNPDLIGSEIARWLSTLEISG

SEQ ID NO: 2647 - protein, 277 aa, Synthetic construct
MFHYVDVGPRDGTPVLFLHGNPTSSYVWRNIIPHVAPTHRCIAPDLIGMGKSDKPDLGYFFDDHVRFMDAFIEALGLEEVVLVIHDWGSALGFHWAKRNPERVKGIAFMEFIRPIPTWDEWPEFARETFQAFRTTDVGRKLIIDQNVFIEGTLPMGVVRPLTEVEMDHYREPFLNPVDREPLWRFPNELPIAGEPANIVALVEEYMDWLHQSPVPKLLFWGTPGVLIPPAEAARLAKSLPNCKAVQIGPGLNLLQEDNPDLIGSEIARWLSTLEISG

SEQ ID NO: 2648 - protein, 277 aa, Synthetic construct
MFHYVDVGPRDGTPVLFLHGNPTSSYVWRNIIPHVAPTHRCIAPDLIGMGKSDKPDLGYFFDDHVRFMDAFIEALGLEEVVLVIHDWGSALGFHWAKRNPERVKGIAFMEFIRPIPTWDEWPEFARETFQAFRTTDVGRKLIIDQNVFIEGTLPMGVVRPLTEVEMDHYREPFLNPVDREPLWRFPNELPIAGEPANIVALVEEYMDWLHQSPVPKLLFWGTPGVLIPPAEAARLAKSLPNCKAVAIGPGLNLLQEDNPDLIGSEIARWLSTLEISG

SEQ ID NO: 2649 - protein, 277 aa, Synthetic construct
MFHYVDVGPRDGTPVLFLHGNPTSSYVWRNIIPHVAPTHRCIAPDLIGMGKSDKPDLGYFFDDHVRFMDAFIEALGLEEVVLVIHDWGSALGFHWAKRNPERVKGIAFMEFIRPIPTWDEWPEFARETFQAFRTTDVGRKLIIDQNVFIEGTLPMGVVRPLTEVEMDHYREPFLNPVDREPLWRFPNELPIAGEPANIVALVEEYMDWLHQSPVPKLLFWGTPGVLIPPAEAARLAKSLPNCKAVSIGPGLNLLQEDNPDLIGSEIARWLSTLEISG

SEQ ID NO: 2650 - protein, 277 aa, Synthetic construct
MFHYVDVGPRDGTPVLFLHGNPTSSYVWRNIIPHVAPTHRCIAPDLIGMGKSDKPDLGYFFDDHVRFMDAFIEALGLEEVVLVIHDWGSALGFHWAKRNPERVKGIAFMEFIRPIPTWDEWPEFARETFQAFRTTDVGRKLIIDQNVFIEGTLPMGVVRPLTEVEMDHYREPFLNPVDREPLWRFPNELPIAGEPANIVALVEEYMDWLHQSPVPKLLFWGTPGVLIPPAEAARLAKSLPNCKAVDVGPGLNLLQEDNPDLIGSEIARWLSTLEISG

SEQ ID NO: 2651 - protein, 277 aa, Synthetic construct
MFHYVDVGPRDGTPVLFLHGNPTSSYVWRNIIPHVAPTHRCIAPDLIGMGKSDKPDLGYFFDDHVRFMDAFIEALGLEEVVLVIHDWGSALGFHWAKRNPERVKGIAFMEFIRPIPTWDEWPEFARETFQAFRTTDVGRKLIIDQNVFIEGTLPMGVVRPLTEVEMDHYREPFLNPVDREPLWRFPNELPIAGEPANIVALVEEYMDWLHQSPVPKLLFWGTPGVLIPPAEAARLAKSLPNCKAVDLGPGLNLLQEDNPDLIGSEIARWLSTLEISG

SEQ ID NO: 2652 - protein, 277 aa, Synthetic construct
MFHYVDVGPRDGTPVLFLHGNPTSSYVWRNIIPHVAPTHRCIAPDLIGMGKSDKPDLGYFFDDHVRFMDAFIEALGLEEVVLVIHDWGSALGFHWAKRNPERVKGIAFMEFIRPIPTWDEWPEFARETFQAFRTTDVGRKLIIDQNVFIEGTLPMGVVRPLTEVEMDHYREPFLNPVDREPLWRFPNELPIAGEPANIVALVEEYMDWLHQSPVPKLLFWGTPGVLIPPAEAARLAKSLPNCKAVDAGPGLNLLQEDNPDLIGSEIARWLSTLEISG

SEQ ID NO: 2653 - protein, 277 aa, Synthetic construct
MFHYVDVGPRDGTPVLFLHGNPTSSYVWRNIIPHVAPTHRCIAPDLIGMGKSDKPDLGYFFDDHVRFMDAFIEALGLEEVVLVIHDWGSALGFHWAKRNPERVKGIAFMEFIRPIPTWDEWPEFARETFQAFRTTDVGRKLIIDQNVFIEGTLPMGVVRPLTEVEMDHYREPFLNPVDREPLWRFPNELPIAGEPANIVALVEEYMDWLHQSPVPKLLFWGTPGVLIPPAEAARLAKSLPNCKAVDCGPGLNLLQEDNPDLIGSEIARWLSTLEISG

SEQ ID NO: 2654 - protein, 277 aa, Synthetic construct
MFHYVDVGPRDGTPVLFLHGNPTSSYVWRNIIPHVAPTHRCIAPDLIGMGKSDKPDLGYFFDDHVRFMDAFIEALGLEEVVLVIHDWGSALGFHWAKRNPERVKGIAFMEFIRPIPTWDEWPEFARETFQAFRTTDVGRKLIIDQNVFIEGTLPMGVVRPLTEVEMDHYREPFLNPVDREPLWRFPNELPIAGEPANIVALVEEYMDWLHQSPVPKLLFWGTPGVLIPPAEAARLAKSLPNCKAVDFGPGLNLLQEDNPDLIGSEIARWLSTLEISG

SEQ ID NO: 2655 - protein, 277 aa, Synthetic construct
MFHYVDVGPRDGTPVLFLHGNPTSSYVWRNIIPHVAPTHRCIAPDLIGMGKSDKPDLGYFFDDHVRFMDAFIEALGLEEVVLVIHDWGSALGFHWAKRNPERVKGIAFMEFIRPIPTWDEWPEFARETFQAFRTTDVGRKLIIDQNVFIEGTLPMGVVRPLTEVEMDHYREPFLNPVDREPLWRFPNELPIAGEPANIVALVEEYMDWLHQSPVPKLLFWGTPGVLIPPAEAARLAKSLPNCKAVDTGPGLNLLQEDNPDLIGSEIARWLSTLEISG

SEQ ID NO: 2656 - protein, 277 aa, Synthetic construct
MFHYVDVGPRDGTPVLFLHGNPTSSYVWRNIIPHVAPTHRCIAPDLIGMGKSDKPDLGYFFDDHVRFMDAFIEALGLEEVVLVIHDWGSALGFHWAKRNPERVKGIAFMEFIRPIPTWDEWPEFARETFQAFRTTDVGRKLIIDQNVFIEGTLPMGVVRPLTEVEMDHYREPFLNPVDREPLWRFPNELPIAGEPANIVALVEEYMDWLHQSPVPKLLFWGTPGVLIPPAEAARLAKSLPNCKAVDIAPGLNLLQEDNPDLIGSEIARWLSTLEISG

SEQ ID NO: 2657 - protein, 277 aa, Synthetic construct
MFHYVDVGPRDGTPVLFLHGNPTSSYVWRNIIPHVAPTHRCIAPDLIGMGKSDKPDLGYFFDDHVRFMDAFIEALGLEEVVLVIHDWGSALGFHWAKRNPERVKGIAFMEFIRPIPTWDEWPEFARETFQAFRTTDVGRKLIIDQNVFIEGTLPMGVVRPLTEVEMDHYREPFLNPVDREPLWRFPNELPIAGEPANIVALVEEYMDWLHQSPVPKLLFWGTPGVLIPPAEAARLAKSLPNCKAVDIEPGLNLLQEDNPDLIGSEIARWLSTLEISG

SEQ ID NO: 2658 - protein, 277 aa, Synthetic construct
MFHYVDVGPRDGTPVLFLHGNPTSSYVWRNIIPHVAPTHRCIAPDLIGMGKSDKPDLGYFFDDHVRFMDAFIEALGLEEVVLVIHDWGSALGFHWAKRNPERVKGIAFMEFIRPIPTWDEWPEFARETFQAFRTTDVGRKLIIDQNVFIEGTLPMGVVRPLTEVEMDHYREPFLNPVDREPLWRFPNELPIAGEPANIVALVEEYMDWLHQSPVPKLLFWGTPGVLIPPAEAARLAKSLPNCKAVDISPGLNLLQEDNPDLIGSEIARWLSTLEISG

SEQ ID NO: 2659 - protein, 277 aa, Synthetic construct
MFHYVDVGPRDGTPVLFLHGNPTSSYVWRNIIPHVAPTHRCIAPDLIGMGKSDKPDLGYFFDDHVRFMDAFIEALGLEEVVLVIHDWGSALGFHWAKRNPERVKGIAFMEFIRPIPTWDEWPEFARETFQAFRTTDVGRKLIIDQNVFIEGTLPMGVVRPLTEVEMDHYREPFLNPVDREPLWRFPNELPIAGEPANIVALVEEYMDWLHQSPVPKLLFWGTPGVLIPPAEAARLAKSLPNCKAVDIPPGLNLLQEDNPDLIGSEIARWLSTLEISG

SEQ ID NO: 2660 - protein, 277 aa, Synthetic construct
MFHYVDVGPRDGTPVLFLHGNPTSSYVWRNIIPHVAPTHRCIAPDLIGMGKSDKPDLGYFFDDHVRFMDAFIEALGLEEVVLVIHDWGSALGFHWAKRNPERVKGIAFMEFIRPIPTWDEWPEFARETFQAFRTTDVGRKLIIDQNVFIEGTLPMGVVRPLTEVEMDHYREPFLNPVDREPLWRFPNELPIAGEPANIVALVEEYMDWLHQSPVPKLLFWGTPGVLIPPAEAARLAKSLPNCKAVDIDPGLNLLQEDNPDLIGSEIARWLSTLEISG

SEQ ID NO: 2661 - protein, 277 aa, Synthetic construct
MFHYVDVGPRDGTPVLFLHGNPTSSYVWRNIIPHVAPTHRCIAPDLIGMGKSDKPDLGYFFDDHVRFMDAFIEALGLEEVVLVIHDWGSALGFHWAKRNPERVKGIAFMEFIRPIPTWDEWPEFARETFQAFRTTDVGRKLIIDQNVFIEGTLPMGVVRPLTEVEMDHYREPFLNPVDREPLWRFPNELPIAGEPANIVALVEEYMDWLHQSPVPKLLFWGTPGVLIPPAEAARLAKSLPNCKAVDITPGLNLLQEDNPDLIGSEIARWLSTLEISG

SEQ ID NO: 2662 - protein, 277 aa, Synthetic construct
MFHYVDVGPRDGTPVLFLHGNPTSSYVWRNIIPHVAPTHRCIAPDLIGMGKSDKPDLGYFFDDHVRFMDAFIEALGLEEVVLVIHDWGSALGFHWAKRNPERVKGIAFMEFIRPIPTWDEWPEFARETFQAFRTTDVGRKLIIDQNVFIEGTLPMGVVRPLTEVEMDHYREPFLNPVDREPLWRFPNELPIAGEPANIVALVEEYMDWLHQSPVPKLLFWGTPGVLIPPAEAARLAKSLPNCKAVDIGEGLNLLQEDNPDLIGSEIARWLSTLEISG

SEQ ID NO: 2663 - protein, 277 aa, Synthetic construct
MFHYVDVGPRDGTPVLFLHGNPTSSYVWRNIIPHVAPTHRCIAPDLIGMGKSDKPDLGYFFDDHVRFMDAFIEALGLEEVVLVIHDWGSALGFHWAKRNPERVKGIAFMEFIRPIPTWDEWPEFARETFQAFRTTDVGRKLIIDQNVFIEGTLPMGVVRPLTEVEMDHYREPFLNPVDREPLWRFPNELPIAGEPANIVALVEEYMDWLHQSPVPKLLFWGTPGVLIPPAEAARLAKSLPNCKAVDIGAGLNLLQEDNPDLIGSEIARWLSTLEISG

SEQ ID NO: 2664 - protein, 277 aa, Synthetic construct
MFHYVDVGPRDGTPVLFLHGNPTSSYVWRNIIPHVAPTHRCIAPDLIGMGKSDKPDLGYFFDDHVRFMDAFIEALGLEEVVLVIHDWGSALGFHWAKRNPERVKGIAFMEFIRPIPTWDEWPEFARETFQAFRTTDVGRKLIIDQNVFIEGTLPMGVVRPLTEVEMDHYREPFLNPVDREPLWRFPNELPIAGEPANIVALVEEYMDWLHQSPVPKLLFWGTPGVLIPPAEAARLAKSLPNCKAVDIGDGLNLLQEDNPDLIGSEIARWLSTLEISG

SEQ ID NO: 2665 - protein, 277 aa, Synthetic construct
MFHYVDVGPRDGTPVLFLHGNPTSSYVWRNIIPHVAPTHRCIAPDLIGMGKSDKPDLGYFFDDHVRFMDAFIEALGLEEVVLVIHDWGSALGFHWAKRNPERVKGIAFMEFIRPIPTWDEWPEFARETFQAFRTTDVGRKLIIDQNVFIEGTLPMGVVRPLTEVEMDHYREPFLNPVDREPLWRFPNELPIAGEPANIVALVEEYMDWLHQSPVPKLLFWGTPGVLIPPAEAARLAKSLPNCKAVDIGSGLNLLQEDNPDLIGSEIARWLSTLEISG

SEQ ID NO: 2666 - protein, 277 aa, Synthetic construct
MFHYVDVGPRDGTPVLFLHGNPTSSYVWRNIIPHVAPTHRCIAPDLIGMGKSDKPDLGYFFDDHVRFMDAFIEALGLEEVVLVIHDWGSALGFHWAKRNPERVKGIAFMEFIRPIPTWDEWPEFARETFQAFRTTDVGRKLIIDQNVFIEGTLPMGVVRPLTEVEMDHYREPFLNPVDREPLWRFPNELPIAGEPANIVALVEEYMDWLHQSPVPKLLFWGTPGVLIPPAEAARLAKSLPNCKAVDIGKGLNLLQEDNPDLIGSEIARWLSTLEISG

SEQ ID NO: 2667 - protein, 277 aa, Synthetic construct
MFHYVDVGPRDGTPVLFLHGNPTSSYVWRNIIPHVAPTHRCIAPDLIGMGKSDKPDLGYFFDDHVRFMDAFIEALGLEEVVLVIHDWGSALGFHWAKRNPERVKGIAFMEFIRPIPTWDEWPEFARETFQAFRTTDVGRKLIIDQNVFIEGTLPMGVVRPLTEVEMDHYREPFLNPVDREPLWRFPNELPIAGEPANIVALVEEYMDWLHQSPVPKLLFWGTPGVLIPPAEAARLAKSLPNCKAVDIGTGLNLLQEDNPDLIGSEIARWLSTLEISG

SEQ ID NO: 2668 - protein, 277 aa, Synthetic construct
MFHYVDVGPRDGTPVLFLHGNPTSSYVWRNIIPHVAPTHRCIAPDLIGMGKSDKPDLGYFFDDHVRFMDAFIEALGLEEVVLVIHDWGSALGFHWAKRNPERVKGIAFMEFIRPIPTWDEWPEFARETFQAFRTTDVGRKLIIDQNVFIEGTLPMGVVRPLTEVEMDHYREPFLNPVDREPLWRFPNELPIAGEPANIVALVEEYMDWLHQSPVPKLLFWGTPGVLIPPAEAARLAKSLPNCKAVDIGPALNLLQEDNPDLIGSEIARWLSTLEISG

SEQ ID NO: 2669 - protein, 277 aa, Synthetic construct
MFHYVDVGPRDGTPVLFLHGNPTSSYVWRNIIPHVAPTHRCIAPDLIGMGKSDKPDLGYFFDDHVRFMDAFIEALGLEEVVLVIHDWGSALGFHWAKRNPERVKGIAFMEFIRPIPTWDEWPEFARETFQAFRTTDVGRKLIIDQNVFIEGTLPMGVVRPLTEVEMDHYREPFLNPVDREPLWRFPNELPIAGEPANIVALVEEYMDWLHQSPVPKLLFWGTPGVLIPPAEAARLAKSLPNCKAVDIGPSLNLLQEDNPDLIGSEIARWLSTLEISG

SEQ ID NO: 2670 - protein, 277 aa, Synthetic construct
MFHYVDVGPRDGTPVLFLHGNPTSSYVWRNIIPHVAPTHRCIAPDLIGMGKSDKPDLGYFFDDHVRFMDAFIEALGLEEVVLVIHDWGSALGFHWAKRNPERVKGIAFMEFIRPIPTWDEWPEFARETFQAFRTTDVGRKLIIDQNVFIEGTLPMGVVRPLTEVEMDHYREPFLNPVDREPLWRFPNELPIAGEPANIVALVEEYMDWLHQSPVPKLLFWGTPGVLIPPAEAARLAKSLPNCKAVDIGPTLNLLQEDNPDLIGSEIARWLSTLEISG

SEQ ID NO: 2671 - protein, 277 aa, Synthetic construct
MFHYVDVGPRDGTPVLFLHGNPTSSYVWRNIIPHVAPTHRCIAPDLIGMGKSDKPDLGYFFDDHVRFMDAFIEALGLEEVVLVIHDWGSALGFHWAKRNPERVKGIAFMEFIRPIPTWDEWPEFARETFQAFRTTDVGRKLIIDQNVFIEGTLPMGVVRPLTEVEMDHYREPFLNPVDREPLWRFPNELPIAGEPANIVALVEEYMDWLHQSPVPKLLFWGTPGVLIPPAEAARLAKSLPNCKAVDIGPVLNLLQEDNPDLIGSEIARWLSTLEISG

SEQ ID NO: 2672 - protein, 277 aa, Synthetic construct
MFHYVDVGPRDGTPVLFLHGNPTSSYVWRNIIPHVAPTHRCIAPDLIGMGKSDKPDLGYFFDDHVRFMDAFIEALGLEEVVLVIHDWGSALGFHWAKRNPERVKGIAFMEFIRPIPTWDEWPEFARETFQAFRTTDVGRKLIIDQNVFIEGTLPMGVVRPLTEVEMDHYREPFLNPVDREPLWRFPNELPIAGEPANIVALVEEYMDWLHQSPVPKLLFWGTPGVLIPPAEAARLAKSLPNCKAVDIGPCLNLLQEDNPDLIGSEIARWLSTLEISG

SEQ ID NO: 2673 - protein, 277 aa, Synthetic construct
MFHYVDVGPRDGTPVLFLHGNPTSSYVWRNIIPHVAPTHRCIAPDLIGMGKSDKPDLGYFFDDHVRFMDAFIEALGLEEVVLVIHDWGSALGFHWAKRNPERVKGIAFMEFIRPIPTWDEWPEFARETFQAFRTTDVGRKLIIDQNVFIEGTLPMGVVRPLTEVEMDHYREPFLNPVDREPLWRFPNELPIAGEPANIVALVEEYMDWLHQSPVPKLLFWGTPGVLIPPAEAARLAKSLPNCKAVDIGPNLNLLQEDNPDLIGSEIARWLSTLEISG

SEQ ID NO: 2674 - protein, 277 aa, Synthetic construct
MFHYVDVGPRDGTPVLFLHGNPTSSYVWRNIIPHVAPTHRCIAPDLIGMGKSDKPDLGYFFDDHVRFMDAFIEALGLEEVVLVIHDWGSALGFHWAKRNPERVKGIAFMEFIRPIPTWDEWPEFARETFQAFRTTDVGRKLIIDQNVFIEGTLPMGVVRPLTEVEMDHYREPFLNPVDREPLWRFPNELPIAGEPANIVALVEEYMDWLHQSPVPKLLFWGTPGVLIPPAEAARLAKSLPNCKAVDIGPGINLLQEDNPDLIGSEIARWLSTLEISG

SEQ ID NO: 2675 - protein, 277 aa, Synthetic construct
MFHYVDVGPRDGTPVLFLHGNPTSSYVWRNIIPHVAPTHRCIAPDLIGMGKSDKPDLGYFFDDHVRFMDAFIEALGLEEVVLVIHDWGSALGFHWAKRNPERVKGIAFMEFIRPIPTWDEWPEFARETFQAFRTTDVGRKLIIDQNVFIEGTLPMGVVRPLTEVEMDHYREPFLNPVDREPLWRFPNELPIAGEPANIVALVEEYMDWLHQSPVPKLLFWGTPGVLIPPAEAARLAKSLPNCKAVDIGPGVNLLQEDNPDLIGSEIARWLSTLEISG

SEQ ID NO: 2676 - protein, 277 aa, Synthetic construct
MFHYVDVGPRDGTPVLFLHGNPTSSYVWRNIIPHVAPTHRCIAPDLIGMGKSDKPDLGYFFDDHVRFMDAFIEALGLEEVVLVIHDWGSALGFHWAKRNPERVKGIAFMEFIRPIPTWDEWPEFARETFQAFRTTDVGRKLIIDQNVFIEGTLPMGVVRPLTEVEMDHYREPFLNPVDREPLWRFPNELPIAGEPANIVALVEEYMDWLHQSPVPKLLFWGTPGVLIPPAEAARLAKSLPNCKAVDIGPGRNLLQEDNPDLIGSEIARWLSTLEISG

SEQ ID NO: 2677 - protein, 277 aa, Synthetic construct
MFHYVDVGPRDGTPVLFLHGNPTSSYVWRNIIPHVAPTHRCIAPDLIGMGKSDKPDLGYFFDDHVRFMDAFIEALGLEEVVLVIHDWGSALGFHWAKRNPERVKGIAFMEFIRPIPTWDEWPEFARETFQAFRTTDVGRKLIIDQNVFIEGTLPMGVVRPLTEVEMDHYREPFLNPVDREPLWRFPNELPIAGEPANIVALVEEYMDWLHQSPVPKLLFWGTPGVLIPPAEAARLAKSLPNCKAVDIGPGKNLLQEDNPDLIGSEIARWLSTLEISG

SEQ ID NO: 2678 - protein, 277 aa, Synthetic construct
MFHYVDVGPRDGTPVLFLHGNPTSSYVWRNIIPHVAPTHRCIAPDLIGMGKSDKPDLGYFFDDHVRFMDAFIEALGLEEVVLVIHDWGSALGFHWAKRNPERVKGIAFMEFIRPIPTWDEWPEFARETFQAFRTTDVGRKLIIDQNVFIEGTLPMGVVRPLTEVEMDHYREPFLNPVDREPLWRFPNELPIAGEPANIVALVEEYMDWLHQSPVPKLLFWGTPGVLIPPAEAARLAKSLPNCKAVDIGPGANLLQEDNPDLIGSEIARWLSTLEISG

SEQ ID NO: 2679 - protein, 277 aa, Synthetic construct
MFHYVDVGPRDGTPVLFLHGNPTSSYVWRNIIPHVAPTHRCIAPDLIGMGKSDKPDLGYFFDDHVRFMDAFIEALGLEEVVLVIHDWGSALGFHWAKRNPERVKGIAFMEFIRPIPTWDEWPEFARETFQAFRTTDVGRKLIIDQNVFIEGTLPMGVVRPLTEVEMDHYREPFLNPVDREPLWRFPNELPIAGEPANIVALVEEYMDWLHQSPVPKLLFWGTPGVLIPPAEAARLAKSLPNCKAVDIGPGLHLLQEDNPDLIGSEIARWLSTLEISG

SEQ ID NO: 2680 - protein, 277 aa, Synthetic construct
MFHYVDVGPRDGTPVLFLHGNPTSSYVWRNIIPHVAPTHRCIAPDLIGMGKSDKPDLGYFFDDHVRFMDAFIEALGLEEVVLVIHDWGSALGFHWAKRNPERVKGIAFMEFIRPIPTWDEWPEFARETFQAFRTTDVGRKLIIDQNVFIEGTLPMGVVRPLTEVEMDHYREPFLNPVDREPLWRFPNELPIAGEPANIVALVEEYMDWLHQSPVPKLLFWGTPGVLIPPAEAARLAKSLPNCKAVDIGPGLYLLQEDNPDLIGSEIARWLSTLEISG

SEQ ID NO: 2681 - protein, 277 aa, Synthetic construct
MFHYVDVGPRDGTPVLFLHGNPTSSYVWRNIIPHVAPTHRCIAPDLIGMGKSDKPDLGYFFDDHVRFMDAFIEALGLEEVVLVIHDWGSALGFHWAKRNPERVKGIAFMEFIRPIPTWDEWPEFARETFQAFRTTDVGRKLIIDQNVFIEGTLPMGVVRPLTEVEMDHYREPFLNPVDREPLWRFPNELPIAGEPANIVALVEEYMDWLHQSPVPKLLFWGTPGVLIPPAEAARLAKSLPNCKAVDIGPGLQLLQEDNPDLIGSEIARWLSTLEISG

SEQ ID NO: 2682 - protein, 277 aa, Synthetic construct
MFHYVDVGPRDGTPVLFLHGNPTSSYVWRNIIPHVAPTHRCIAPDLIGMGKSDKPDLGYFFDDHVRFMDAFIEALGLEEVVLVIHDWGSALGFHWAKRNPERVKGIAFMEFIRPIPTWDEWPEFARETFQAFRTTDVGRKLIIDQNVFIEGTLPMGVVRPLTEVEMDHYREPFLNPVDREPLWRFPNELPIAGEPANIVALVEEYMDWLHQSPVPKLLFWGTPGVLIPPAEAARLAKSLPNCKAVDIGPGLLLLQEDNPDLIGSEIARWLSTLEISG

SEQ ID NO: 2683 - protein, 277 aa, Synthetic construct
MFHYVDVGPRDGTPVLFLHGNPTSSYVWRNIIPHVAPTHRCIAPDLIGMGKSDKPDLGYFFDDHVRFMDAFIEALGLEEVVLVIHDWGSALGFHWAKRNPERVKGIAFMEFIRPIPTWDEWPEFARETFQAFRTTDVGRKLIIDQNVFIEGTLPMGVVRPLTEVEMDHYREPFLNPVDREPLWRFPNELPIAGEPANIVALVEEYMDWLHQSPVPKLLFWGTPGVLIPPAEAARLAKSLPNCKAVDIGPGLFLLQEDNPDLIGSEIARWLSTLEISG

SEQ ID NO: 2684 - protein, 277 aa, Synthetic construct
MFHYVDVGPRDGTPVLFLHGNPTSSYVWRNIIPHVAPTHRCIAPDLIGMGKSDKPDLGYFFDDHVRFMDAFIEALGLEEVVLVIHDWGSALGFHWAKRNPERVKGIAFMEFIRPIPTWDEWPEFARETFQAFRTTDVGRKLIIDQNVFIEGTLPMGVVRPLTEVEMDHYREPFLNPVDREPLWRFPNELPIAGEPANIVALVEEYMDWLHQSPVPKLLFWGTPGVLIPPAEAARLAKSLPNCKAVDIGPGLSLLQEDNPDLIGSEIARWLSTLEISG

SEQ ID NO: 2685 - protein, 277 aa, Synthetic construct
MFHYVDVGPRDGTPVLFLHGNPTSSYVWRNIIPHVAPTHRCIAPDLIGMGKSDKPDLGYFFDDHVRFMDAFIEALGLEEVVLVIHDWGSALGFHWAKRNPERVKGIAFMEFIRPIPTWDEWPEFARETFQAFRTTDVGRKLIIDQNVFIEGTLPMGVVRPLTEVEMDHYREPFLNPVDREPLWRFPNELPIAGEPANIVALVEEYMDWLHQSPVPKLLFWGTPGVLIPPAEAARLAKSLPNCKAVDIGPGLNFLQEDNPDLIGSEIARWLSTLEISG

SEQ ID NO: 2686 - protein, 277 aa, Synthetic construct
MFHYVDVGPRDGTPVLFLHGNPTSSYVWRNIIPHVAPTHRCIAPDLIGMGKSDKPDLGYFFDDHVRFMDAFIEALGLEEVVLVIHDWGSALGFHWAKRNPERVKGIAFMEFIRPIPTWDEWPEFARETFQAFRTTDVGRKLIIDQNVFIEGTLPMGVVRPLTEVEMDHYREPFLNPVDREPLWRFPNELPIAGEPANIVALVEEYMDWLHQSPVPKLLFWGTPGVLIPPAEAARLAKSLPNCKAVDIGPGLNYLQEDNPDLIGSEIARWLSTLEISG

SEQ ID NO: 2687 - protein, 277 aa, Synthetic construct
MFHYVDVGPRDGTPVLFLHGNPTSSYVWRNIIPHVAPTHRCIAPDLIGMGKSDKPDLGYFFDDHVRFMDAFIEALGLEEVVLVIHDWGSALGFHWAKRNPERVKGIAFMEFIRPIPTWDEWPEFARETFQAFRTTDVGRKLIIDQNVFIEGTLPMGVVRPLTEVEMDHYREPFLNPVDREPLWRFPNELPIAGEPANIVALVEEYMDWLHQSPVPKLLFWGTPGVLIPPAEAARLAKSLPNCKAVDIGPGLNHLQEDNPDLIGSEIARWLSTLEISG

SEQ ID NO: 2688 - protein, 277 aa, Synthetic construct
MFHYVDVGPRDGTPVLFLHGNPTSSYVWRNIIPHVAPTHRCIAPDLIGMGKSDKPDLGYFFDDHVRFMDAFIEALGLEEVVLVIHDWGSALGFHWAKRNPERVKGIAFMEFIRPIPTWDEWPEFARETFQAFRTTDVGRKLIIDQNVFIEGTLPMGVVRPLTEVEMDHYREPFLNPVDREPLWRFPNELPIAGEPANIVALVEEYMDWLHQSPVPKLLFWGTPGVLIPPAEAARLAKSLPNCKAVDIGPGLNWLQEDNPDLIGSEIARWLSTLEISG

SEQ ID NO: 2689 - protein, 277 aa, Synthetic construct
MFHYVDVGPRDGTPVLFLHGNPTSSYVWRNIIPHVAPTHRCIAPDLIGMGKSDKPDLGYFFDDHVRFMDAFIEALGLEEVVLVIHDWGSALGFHWAKRNPERVKGIAFMEFIRPIPTWDEWPEFARETFQAFRTTDVGRKLIIDQNVFIEGTLPMGVVRPLTEVEMDHYREPFLNPVDREPLWRFPNELPIAGEPANIVALVEEYMDWLHQSPVPKLLFWGTPGVLIPPAEAARLAKSLPNCKAVDIGPGLNMLQEDNPDLIGSEIARWLSTLEISG

SEQ ID NO: 2690 - protein, 277 aa, Synthetic construct
MFHYVDVGPRDGTPVLFLHGNPTSSYVWRNIIPHVAPTHRCIAPDLIGMGKSDKPDLGYFFDDHVRFMDAFIEALGLEEVVLVIHDWGSALGFHWAKRNPERVKGIAFMEFIRPIPTWDEWPEFARETFQAFRTTDVGRKLIIDQNVFIEGTLPMGVVRPLTEVEMDHYREPFLNPVDREPLWRFPNELPIAGEPANIVALVEEYMDWLHQSPVPKLLFWGTPGVLIPPAEAARLAKSLPNCKAVDIGPGLNILQEDNPDLIGSEIARWLSTLEISG

SEQ ID NO: 2691 - protein, 277 aa, Synthetic construct
MFHYVDVGPRDGTPVLFLHGNPTSSYVWRNIIPHVAPTHRCIAPDLIGMGKSDKPDLGYFFDDHVRFMDAFIEALGLEEVVLVIHDWGSALGFHWAKRNPERVKGIAFMEFIRPIPTWDEWPEFARETFQAFRTTDVGRKLIIDQNVFIEGTLPMGVVRPLTEVEMDHYREPFLNPVDREPLWRFPNELPIAGEPANIVALVEEYMDWLHQSPVPKLLFWGTPGVLIPPAEAARLAKSLPNCKAVDIGPGLNLVQEDNPDLIGSEIARWLSTLEISG

SEQ ID NO: 2692 - protein, 277 aa, Synthetic construct
MFHYVDVGPRDGTPVLFLHGNPTSSYVWRNIIPHVAPTHRCIAPDLIGMGKSDKPDLGYFFDDHVRFMDAFIEALGLEEVVLVIHDWGSALGFHWAKRNPERVKGIAFMEFIRPIPTWDEWPEFARETFQAFRTTDVGRKLIIDQNVFIEGTLPMGVVRPLTEVEMDHYREPFLNPVDREPLWRFPNELPIAGEPANIVALVEEYMDWLHQSPVPKLLFWGTPGVLIPPAEAARLAKSLPNCKAVDIGPGLNLIQEDNPDLIGSEIARWLSTLEISG

SEQ ID NO: 2693 - protein, 277 aa, Synthetic construct
MFHYVDVGPRDGTPVLFLHGNPTSSYVWRNIIPHVAPTHRCIAPDLIGMGKSDKPDLGYFFDDHVRFMDAFIEALGLEEVVLVIHDWGSALGFHWAKRNPERVKGIAFMEFIRPIPTWDEWPEFARETFQAFRTTDVGRKLIIDQNVFIEGTLPMGVVRPLTEVEMDHYREPFLNPVDREPLWRFPNELPIAGEPANIVALVEEYMDWLHQSPVPKLLFWGTPGVLIPPAEAARLAKSLPNCKAVDIGPGLNLAQEDNPDLIGSEIARWLSTLEISG

SEQ ID NO: 2694 - protein, 277 aa, Synthetic construct
MFHYVDVGPRDGTPVLFLHGNPTSSYVWRNIIPHVAPTHRCIAPDLIGMGKSDKPDLGYFFDDHVRFMDAFIEALGLEEVVLVIHDWGSALGFHWAKRNPERVKGIAFMEFIRPIPTWDEWPEFARETFQAFRTTDVGRKLIIDQNVFIEGTLPMGVVRPLTEVEMDHYREPFLNPVDREPLWRFPNELPIAGEPANIVALVEEYMDWLHQSPVPKLLFWGTPGVLIPPAEAARLAKSLPNCKAVDIGPGLNLMQEDNPDLIGSEIARWLSTLEISG

SEQ ID NO: 2695 - protein, 277 aa, Synthetic construct
MFHYVDVGPRDGTPVLFLHGNPTSSYVWRNIIPHVAPTHRCIAPDLIGMGKSDKPDLGYFFDDHVRFMDAFIEALGLEEVVLVIHDWGSALGFHWAKRNPERVKGIAFMEFIRPIPTWDEWPEFARETFQAFRTTDVGRKLIIDQNVFIEGTLPMGVVRPLTEVEMDHYREPFLNPVDREPLWRFPNELPIAGEPANIVALVEEYMDWLHQSPVPKLLFWGTPGVLIPPAEAARLAKSLPNCKAVDIGPGLNLTQEDNPDLIGSEIARWLSTLEISG

SEQ ID NO: 2696 - protein, 277 aa, Synthetic construct
MFHYVDVGPRDGTPVLFLHGNPTSSYVWRNIIPHVAPTHRCIAPDLIGMGKSDKPDLGYFFDDHVRFMDAFIEALGLEEVVLVIHDWGSALGFHWAKRNPERVKGIAFMEFIRPIPTWDEWPEFARETFQAFRTTDVGRKLIIDQNVFIEGTLPMGVVRPLTEVEMDHYREPFLNPVDREPLWRFPNELPIAGEPANIVALVEEYMDWLHQSPVPKLLFWGTPGVLIPPAEAARLAKSLPNCKAVDIGPGLNLPQEDNPDLIGSEIARWLSTLEISG

SEQ ID NO: 2697 - protein, 277 aa, Synthetic construct
MFHYVDVGPRDGTPVLFLHGNPTSSYVWRNIIPHVAPTHRCIAPDLIGMGKSDKPDLGYFFDDHVRFMDAFIEALGLEEVVLVIHDWGSALGFHWAKRNPERVKGIAFMEFIRPIPTWDEWPEFARETFQAFRTTDVGRKLIIDQNVFIEGTLPMGVVRPLTEVEMDHYREPFLNPVDREPLWRFPNELPIAGEPANIVALVEEYMDWLHQSPVPKLLFWGTPGVLIPPAEAARLAKSLPNCKAVDIGPGLNLLPEDNPDLIGSEIARWLSTLEISG

SEQ ID NO: 2698 - protein, 277 aa, Synthetic construct
MFHYVDVGPRDGTPVLFLHGNPTSSYVWRNIIPHVAPTHRCIAPDLIGMGKSDKPDLGYFFDDHVRFMDAFIEALGLEEVVLVIHDWGSALGFHWAKRNPERVKGIAFMEFIRPIPTWDEWPEFARETFQAFRTTDVGRKLIIDQNVFIEGTLPMGVVRPLTEVEMDHYREPFLNPVDREPLWRFPNELPIAGEPANIVALVEEYMDWLHQSPVPKLLFWGTPGVLIPPAEAARLAKSLPNCKAVDIGPGLNLLHEDNPDLIGSEIARWLSTLEISG

SEQ ID NO: 2699 - protein, 277 aa, Synthetic construct
MFHYVDVGPRDGTPVLFLHGNPTSSYVWRNIIPHVAPTHRCIAPDLIGMGKSDKPDLGYFFDDHVRFMDAFIEALGLEEVVLVIHDWGSALGFHWAKRNPERVKGIAFMEFIRPIPTWDEWPEFARETFQAFRTTDVGRKLIIDQNVFIEGTLPMGVVRPLTEVEMDHYREPFLNPVDREPLWRFPNELPIAGEPANIVALVEEYMDWLHQSPVPKLLFWGTPGVLIPPAEAARLAKSLPNCKAVDIGPGLNLLAEDNPDLIGSEIARWLSTLEISG

SEQ ID NO: 2700 - protein, 277 aa, Synthetic construct
MFHYVDVGPRDGTPVLFLHGNPTSSYVWRNIIPHVAPTHRCIAPDLIGMGKSDKPDLGYFFDDHVRFMDAFIEALGLEEVVLVIHDWGSALGFHWAKRNPERVKGIAFMEFIRPIPTWDEWPEFARETFQAFRTTDVGRKLIIDQNVFIEGTLPMGVVRPLTEVEMDHYREPFLNPVDREPLWRFPNELPIAGEPANIVALVEEYMDWLHQSPVPKLLFWGTPGVLIPPAEAARLAKSLPNCKAVDIGPGLNLLTEDNPDLIGSEIARWLSTLEISG

SEQ ID NO: 2701 - protein, 277 aa, Synthetic construct
MFHYVDVGPRDGTPVLFLHGNPTSSYVWRNIIPHVAPTHRCIAPDLIGMGKSDKPDLGYFFDDHVRFMDAFIEALGLEEVVLVIHDWGSALGFHWAKRNPERVKGIAFMEFIRPIPTWDEWPEFARETFQAFRTTDVGRKLIIDQNVFIEGTLPMGVVRPLTEVEMDHYREPFLNPVDREPLWRFPNELPIAGEPANIVALVEEYMDWLHQSPVPKLLFWGTPGVLIPPAEAARLAKSLPNCKAVDIGPGLNLLLEDNPDLIGSEIARWLSTLEISG

SEQ ID NO: 2702 - protein, 277 aa, Synthetic construct
MFHYVDVGPRDGTPVLFLHGNPTSSYVWRNIIPHVAPTHRCIAPDLIGMGKSDKPDLGYFFDDHVRFMDAFIEALGLEEVVLVIHDWGSALGFHWAKRNPERVKGIAFMEFIRPIPTWDEWPEFARETFQAFRTTDVGRKLIIDQNVFIEGTLPMGVVRPLTEVEMDHYREPFLNPVDREPLWRFPNELPIAGEPANIVALVEEYMDWLHQSPVPKLLFWGTPGVLIPPAEAARLAKSLPNCKAVDIGPGLNLLVEDNPDLIGSEIARWLSTLEISG

SEQ ID NO: 2703 - protein, 277 aa, Synthetic construct
MFHYVDVGPRDGTPVLFLHGNPTSSYVWRNIIPHVAPTHRCIAPDLIGMGKSDKPDLGYFFDDHVRFMDAFIEALGLEEVVLVIHDWGSALGFHWAKRNPERVKGIAFMEFIRPIPTWDEWPEFARETFQAFRTTDVGRKLIIDQNVFIEGTLPMGVVRPLTEVEMDHYREPFLNPVDREPLWRFPNELPIAGEPANIVALVEEYMDWLHQSPVPKLLFWGTPGVLIPPAEAARLAKSLPNCKAVDIGPGLNLLQDDNPDLIGSEIARWLSTLEISG

SEQ ID NO: 2704 - protein, 277 aa, Synthetic construct
MFHYVDVGPRDGTPVLFLHGNPTSSYVWRNIIPHVAPTHRCIAPDLIGMGKSDKPDLGYFFDDHVRFMDAFIEALGLEEVVLVIHDWGSALGFHWAKRNPERVKGIAFMEFIRPIPTWDEWPEFARETFQAFRTTDVGRKLIIDQNVFIEGTLPMGVVRPLTEVEMDHYREPFLNPVDREPLWRFPNELPIAGEPANIVALVEEYMDWLHQSPVPKLLFWGTPGVLIPPAEAARLAKSLPNCKAVDIGPGLNLLQQDNPDLIGSEIARWLSTLEISG

SEQ ID NO: 2705 - protein, 277 aa, Synthetic construct
MFHYVDVGPRDGTPVLFLHGNPTSSYVWRNIIPHVAPTHRCIAPDLIGMGKSDKPDLGYFFDDHVRFMDAFIEALGLEEVVLVIHDWGSALGFHWAKRNPERVKGIAFMEFIRPIPTWDEWPEFARETFQAFRTTDVGRKLIIDQNVFIEGTLPMGVVRPLTEVEMDHYREPFLNPVDREPLWRFPNELPIAGEPANIVALVEEYMDWLHQSPVPKLLFWGTPGVLIPPAEAARLAKSLPNCKAVDIGPGLNLLQADNPDLIGSEIARWLSTLEISG

SEQ ID NO: 2706 - protein, 277 aa, Synthetic construct
MFHYVDVGPRDGTPVLFLHGNPTSSYVWRNIIPHVAPTHRCIAPDLIGMGKSDKPDLGYFFDDHVRFMDAFIEALGLEEVVLVIHDWGSALGFHWAKRNPERVKGIAFMEFIRPIPTWDEWPEFARETFQAFRTTDVGRKLIIDQNVFIEGTLPMGVVRPLTEVEMDHYREPFLNPVDREPLWRFPNELPIAGEPANIVALVEEYMDWLHQSPVPKLLFWGTPGVLIPPAEAARLAKSLPNCKAVDIGPGLNLLQHDNPDLIGSEIARWLSTLEISG

SEQ ID NO: 2707 - protein, 277 aa, Synthetic construct
MFHYVDVGPRDGTPVLFLHGNPTSSYVWRNIIPHVAPTHRCIAPDLIGMGKSDKPDLGYFFDDHVRFMDAFIEALGLEEVVLVIHDWGSALGFHWAKRNPERVKGIAFMEFIRPIPTWDEWPEFARETFQAFRTTDVGRKLIIDQNVFIEGTLPMGVVRPLTEVEMDHYREPFLNPVDREPLWRFPNELPIAGEPANIVALVEEYMDWLHQSPVPKLLFWGTPGVLIPPAEAARLAKSLPNCKAVDIGPGLNLLQSDNPDLIGSEIARWLSTLEISG

SEQ ID NO: 2708 - protein, 277 aa, Synthetic construct
MFHYVDVGPRDGTPVLFLHGNPTSSYVWRNIIPHVAPTHRCIAPDLIGMGKSDKPDLGYFFDDHVRFMDAFIEALGLEEVVLVIHDWGSALGFHWAKRNPERVKGIAFMEFIRPIPTWDEWPEFARETFQAFRTTDVGRKLIIDQNVFIEGTLPMGVVRPLTEVEMDHYREPFLNPVDREPLWRFPNELPIAGEPANIVALVEEYMDWLHQSPVPKLLFWGTPGVLIPPAEAARLAKSLPNCKAVDIGPGLNLLQVDNPDLIGSEIARWLSTLEISG

SEQ ID NO: 2709 - protein, 277 aa, Synthetic construct
MFHYVDVGPRDGTPVLFLHGNPTSSYVWRNIIPHVAPTHRCIAPDLIGMGKSDKPDLGYFFDDHVRFMDAFIEALGLEEVVLVIHDWGSALGFHWAKRNPERVKGIAFMEFIRPIPTWDEWPEFARETFQAFRTTDVGRKLIIDQNVFIEGTLPMGVVRPLTEVEMDHYREPFLNPVDREPLWRFPNELPIAGEPANIVALVEEYMDWLHQSPVPKLLFWGTPGVLIPPAEAARLAKSLPNCKAVDIGPGLNLLQEENPDLIGSEIARWLSTLEISG

SEQ ID NO: 2710 - protein, 277 aa, Synthetic construct
MFHYVDVGPRDGTPVLFLHGNPTSSYVWRNIIPHVAPTHRCIAPDLIGMGKSDKPDLGYFFDDHVRFMDAFIEALGLEEVVLVIHDWGSALGFHWAKRNPERVKGIAFMEFIRPIPTWDEWPEFARETFQAFRTTDVGRKLIIDQNVFIEGTLPMGVVRPLTEVEMDHYREPFLNPVDREPLWRFPNELPIAGEPANIVALVEEYMDWLHQSPVPKLLFWGTPGVLIPPAEAARLAKSLPNCKAVDIGPGLNLLQENNPDLIGSEIARWLSTLEISG

SEQ ID NO: 2711 - protein, 277 aa, Synthetic construct
MFHYVDVGPRDGTPVLFLHGNPTSSYVWRNIIPHVAPTHRCIAPDLIGMGKSDKPDLGYFFDDHVRFMDAFIEALGLEEVVLVIHDWGSALGFHWAKRNPERVKGIAFMEFIRPIPTWDEWPEFARETFQAFRTTDVGRKLIIDQNVFIEGTLPMGVVRPLTEVEMDHYREPFLNPVDREPLWRFPNELPIAGEPANIVALVEEYMDWLHQSPVPKLLFWGTPGVLIPPAEAARLAKSLPNCKAVDIGPGLNLLQESNPDLIGSEIARWLSTLEISG

SEQ ID NO: 2712 - protein, 277 aa, Synthetic construct
MFHYVDVGPRDGTPVLFLHGNPTSSYVWRNIIPHVAPTHRCIAPDLIGMGKSDKPDLGYFFDDHVRFMDAFIEALGLEEVVLVIHDWGSALGFHWAKRNPERVKGIAFMEFIRPIPTWDEWPEFARETFQAFRTTDVGRKLIIDQNVFIEGTLPMGVVRPLTEVEMDHYREPFLNPVDREPLWRFPNELPIAGEPANIVALVEEYMDWLHQSPVPKLLFWGTPGVLIPPAEAARLAKSLPNCKAVDIGPGLNLLQEHNPDLIGSEIARWLSTLEISG

SEQ ID NO: 2713 - protein, 277 aa, Synthetic construct
MFHYVDVGPRDGTPVLFLHGNPTSSYVWRNIIPHVAPTHRCIAPDLIGMGKSDKPDLGYFFDDHVRFMDAFIEALGLEEVVLVIHDWGSALGFHWAKRNPERVKGIAFMEFIRPIPTWDEWPEFARETFQAFRTTDVGRKLIIDQNVFIEGTLPMGVVRPLTEVEMDHYREPFLNPVDREPLWRFPNELPIAGEPANIVALVEEYMDWLHQSPVPKLLFWGTPGVLIPPAEAARLAKSLPNCKAVDIGPGLNLLQEANPDLIGSEIARWLSTLEISG

SEQ ID NO: 2714 - protein, 277 aa, Synthetic construct
MFHYVDVGPRDGTPVLFLHGNPTSSYVWRNIIPHVAPTHRCIAPDLIGMGKSDKPDLGYFFDDHVRFMDAFIEALGLEEVVLVIHDWGSALGFHWAKRNPERVKGIAFMEFIRPIPTWDEWPEFARETFQAFRTTDVGRKLIIDQNVFIEGTLPMGVVRPLTEVEMDHYREPFLNPVDREPLWRFPNELPIAGEPANIVALVEEYMDWLHQSPVPKLLFWGTPGVLIPPAEAARLAKSLPNCKAVDIGPGLNLLQETNPDLIGSEIARWLSTLEISG

SEQ ID NO: 2715 - protein, 277 aa, Synthetic construct
MFHYVDVGPRDGTPVLFLHGNPTSSYVWRNIIPHVAPTHRCIAPDLIGMGKSDKPDLGYFFDDHVRFMDAFIEALGLEEVVLVIHDWGSALGFHWAKRNPERVKGIAFMEFIRPIPTWDEWPEFARETFQAFRTTDVGRKLIIDQNVFIEGTLPMGVVRPLTEVEMDHYREPFLNPVDREPLWRFPNELPIAGEPANIVALVEEYMDWLHQSPVPKLLFWGTPGVLIPPAEAARLAKSLPNCKAVDIGPGLNLLQEDAPDLIGSEIARWLSTLEISG

SEQ ID NO: 2716 - protein, 277 aa, Synthetic construct
MFHYVDVGPRDGTPVLFLHGNPTSSYVWRNIIPHVAPTHRCIAPDLIGMGKSDKPDLGYFFDDHVRFMDAFIEALGLEEVVLVIHDWGSALGFHWAKRNPERVKGIAFMEFIRPIPTWDEWPEFARETFQAFRTTDVGRKLIIDQNVFIEGTLPMGVVRPLTEVEMDHYREPFLNPVDREPLWRFPNELPIAGEPANIVALVEEYMDWLHQSPVPKLLFWGTPGVLIPPAEAARLAKSLPNCKAVDIGPGLNLLQEDQPDLIGSEIARWLSTLEISG

SEQ ID NO: 2717 - protein, 277 aa, Synthetic construct
MFHYVDVGPRDGTPVLFLHGNPTSSYVWRNIIPHVAPTHRCIAPDLIGMGKSDKPDLGYFFDDHVRFMDAFIEALGLEEVVLVIHDWGSALGFHWAKRNPERVKGIAFMEFIRPIPTWDEWPEFARETFQAFRTTDVGRKLIIDQNVFIEGTLPMGVVRPLTEVEMDHYREPFLNPVDREPLWRFPNELPIAGEPANIVALVEEYMDWLHQSPVPKLLFWGTPGVLIPPAEAARLAKSLPNCKAVDIGPGLNLLQEDSPDLIGSEIARWLSTLEISG

SEQ ID NO: 2718 - protein, 277 aa, Synthetic construct
MFHYVDVGPRDGTPVLFLHGNPTSSYVWRNIIPHVAPTHRCIAPDLIGMGKSDKPDLGYFFDDHVRFMDAFIEALGLEEVVLVIHDWGSALGFHWAKRNPERVKGIAFMEFIRPIPTWDEWPEFARETFQAFRTTDVGRKLIIDQNVFIEGTLPMGVVRPLTEVEMDHYREPFLNPVDREPLWRFPNELPIAGEPANIVALVEEYMDWLHQSPVPKLLFWGTPGVLIPPAEAARLAKSLPNCKAVDIGPGLNLLQEDHPDLIGSEIARWLSTLEISG

SEQ ID NO: 2719 - protein, 277 aa, Synthetic construct
MFHYVDVGPRDGTPVLFLHGNPTSSYVWRNIIPHVAPTHRCIAPDLIGMGKSDKPDLGYFFDDHVRFMDAFIEALGLEEVVLVIHDWGSALGFHWAKRNPERVKGIAFMEFIRPIPTWDEWPEFARETFQAFRTTDVGRKLIIDQNVFIEGTLPMGVVRPLTEVEMDHYREPFLNPVDREPLWRFPNELPIAGEPANIVALVEEYMDWLHQSPVPKLLFWGTPGVLIPPAEAARLAKSLPNCKAVDIGPGLNLLQEDRPDLIGSEIARWLSTLEISG

SEQ ID NO: 2720 - protein, 277 aa, Synthetic construct
MFHYVDVGPRDGTPVLFLHGNPTSSYVWRNIIPHVAPTHRCIAPDLIGMGKSDKPDLGYFFDDHVRFMDAFIEALGLEEVVLVIHDWGSALGFHWAKRNPERVKGIAFMEFIRPIPTWDEWPEFARETFQAFRTTDVGRKLIIDQNVFIEGTLPMGVVRPLTEVEMDHYREPFLNPVDREPLWRFPNELPIAGEPANIVALVEEYMDWLHQSPVPKLLFWGTPGVLIPPAEAARLAKSLPNCKAVDIGPGLNLLQEDKPDLIGSEIARWLSTLEISG

SEQ ID NO: 2721 - protein, 277 aa, Synthetic construct
MFHYVDVGPRDGTPVLFLHGNPTSSYVWRNIIPHVAPTHRCIAPDLIGMGKSDKPDLGYFFDDHVRFMDAFIEALGLEEVVLVIHDWGSALGFHWAKRNPERVKGIAFMEFIRPIPTWDEWPEFARETFQAFRTTDVGRKLIIDQNVFIEGTLPMGVVRPLTEVEMDHYREPFLNPVDREPLWRFPNELPIAGEPANIVALVEEYMDWLHQSPVPKLLFWGTPGVLIPPAEAARLAKSLPNCKAVDIGPGLNLLQEDNADLIGSEIARWLSTLEISG

SEQ ID NO: 2722 - protein, 277 aa, Synthetic construct
MFHYVDVGPRDGTPVLFLHGNPTSSYVWRNIIPHVAPTHRCIAPDLIGMGKSDKPDLGYFFDDHVRFMDAFIEALGLEEVVLVIHDWGSALGFHWAKRNPERVKGIAFMEFIRPIPTWDEWPEFARETFQAFRTTDVGRKLIIDQNVFIEGTLPMGVVRPLTEVEMDHYREPFLNPVDREPLWRFPNELPIAGEPANIVALVEEYMDWLHQSPVPKLLFWGTPGVLIPPAEAARLAKSLPNCKAVDIGPGLNLLQEDNGDLIGSEIARWLSTLEISG

SEQ ID NO: 2723 - protein, 277 aa, Synthetic construct
MFHYVDVGPRDGTPVLFLHGNPTSSYVWRNIIPHVAPTHRCIAPDLIGMGKSDKPDLGYFFDDHVRFMDAFIEALGLEEVVLVIHDWGSALGFHWAKRNPERVKGIAFMEFIRPIPTWDEWPEFARETFQAFRTTDVGRKLIIDQNVFIEGTLPMGVVRPLTEVEMDHYREPFLNPVDREPLWRFPNELPIAGEPANIVALVEEYMDWLHQSPVPKLLFWGTPGVLIPPAEAARLAKSLPNCKAVDIGPGLNLLQEDNSDLIGSEIARWLSTLEISG

SEQ ID NO: 2724 - protein, 277 aa, Synthetic construct
MFHYVDVGPRDGTPVLFLHGNPTSSYVWRNIIPHVAPTHRCIAPDLIGMGKSDKPDLGYFFDDHVRFMDAFIEALGLEEVVLVIHDWGSALGFHWAKRNPERVKGIAFMEFIRPIPTWDEWPEFARETFQAFRTTDVGRKLIIDQNVFIEGTLPMGVVRPLTEVEMDHYREPFLNPVDREPLWRFPNELPIAGEPANIVALVEEYMDWLHQSPVPKLLFWGTPGVLIPPAEAARLAKSLPNCKAVDIGPGLNLLQEDNHDLIGSEIARWLSTLEISG

SEQ ID NO: 2725 - protein, 277 aa, Synthetic construct
MFHYVDVGPRDGTPVLFLHGNPTSSYVWRNIIPHVAPTHRCIAPDLIGMGKSDKPDLGYFFDDHVRFMDAFIEALGLEEVVLVIHDWGSALGFHWAKRNPERVKGIAFMEFIRPIPTWDEWPEFARETFQAFRTTDVGRKLIIDQNVFIEGTLPMGVVRPLTEVEMDHYREPFLNPVDREPLWRFPNELPIAGEPANIVALVEEYMDWLHQSPVPKLLFWGTPGVLIPPAEAARLAKSLPNCKAVDIGPGLNLLQEDNTDLIGSEIARWLSTLEISG

SEQ ID NO: 2726 - protein, 277 aa, Synthetic construct
MFHYVDVGPRDGTPVLFLHGNPTSSYVWRNIIPHVAPTHRCIAPDLIGMGKSDKPDLGYFFDDHVRFMDAFIEALGLEEVVLVIHDWGSALGFHWAKRNPERVKGIAFMEFIRPIPTWDEWPEFARETFQAFRTTDVGRKLIIDQNVFIEGTLPMGVVRPLTEVEMDHYREPFLNPVDREPLWRFPNELPIAGEPANIVALVEEYMDWLHQSPVPKLLFWGTPGVLIPPAEAARLAKSLPNCKAVDIGPGLNLLQEDNLDLIGSEIARWLSTLEISG

SEQ ID NO: 2727 - protein, 277 aa, Synthetic construct
MFHYVDVGPRDGTPVLFLHGNPTSSYVWRNIIPHVAPTHRCIAPDLIGMGKSDKPDLGYFFDDHVRFMDAFIEALGLEEVVLVIHDWGSALGFHWAKRNPERVKGIAFMEFIRPIPTWDEWPEFARETFQAFRTTDVGRKLIIDQNVFIEGTLPMGVVRPLTEVEMDHYREPFLNPVDREPLWRFPNELPIAGEPANIVALVEEYMDWLHQSPVPKLLFWGTPGVLIPPAEAARLAKSLPNCKAVDIGPGLNLLQEDNPELIGSEIARWLSTLEISG

SEQ ID NO: 2728 - protein, 277 aa, Synthetic construct
MFHYVDVGPRDGTPVLFLHGNPTSSYVWRNIIPHVAPTHRCIAPDLIGMGKSDKPDLGYFFDDHVRFMDAFIEALGLEEVVLVIHDWGSALGFHWAKRNPERVKGIAFMEFIRPIPTWDEWPEFARETFQAFRTTDVGRKLIIDQNVFIEGTLPMGVVRPLTEVEMDHYREPFLNPVDREPLWRFPNELPIAGEPANIVALVEEYMDWLHQSPVPKLLFWGTPGVLIPPAEAARLAKSLPNCKAVDIGPGLNLLQEDNPALIGSEIARWLSTLEISG

SEQ ID NO: 2729 - protein, 277 aa, Synthetic construct
MFHYVDVGPRDGTPVLFLHGNPTSSYVWRNIIPHVAPTHRCIAPDLIGMGKSDKPDLGYFFDDHVRFMDAFIEALGLEEVVLVIHDWGSALGFHWAKRNPERVKGIAFMEFIRPIPTWDEWPEFARETFQAFRTTDVGRKLIIDQNVFIEGTLPMGVVRPLTEVEMDHYREPFLNPVDREPLWRFPNELPIAGEPANIVALVEEYMDWLHQSPVPKLLFWGTPGVLIPPAEAARLAKSLPNCKAVDIGPGLNLLQEDNPQLIGSEIARWLSTLEISG

SEQ ID NO: 2730 - protein, 277 aa, Synthetic construct
MFHYVDVGPRDGTPVLFLHGNPTSSYVWRNIIPHVAPTHRCIAPDLIGMGKSDKPDLGYFFDDHVRFMDAFIEALGLEEVVLVIHDWGSALGFHWAKRNPERVKGIAFMEFIRPIPTWDEWPEFARETFQAFRTTDVGRKLIIDQNVFIEGTLPMGVVRPLTEVEMDHYREPFLNPVDREPLWRFPNELPIAGEPANIVALVEEYMDWLHQSPVPKLLFWGTPGVLIPPAEAARLAKSLPNCKAVDIGPGLNLLQEDNPHLIGSEIARWLSTLEISG

SEQ ID NO: 2731 - protein, 277 aa, Synthetic construct
MFHYVDVGPRDGTPVLFLHGNPTSSYVWRNIIPHVAPTHRCIAPDLIGMGKSDKPDLGYFFDDHVRFMDAFIEALGLEEVVLVIHDWGSALGFHWAKRNPERVKGIAFMEFIRPIPTWDEWPEFARETFQAFRTTDVGRKLIIDQNVFIEGTLPMGVVRPLTEVEMDHYREPFLNPVDREPLWRFPNELPIAGEPANIVALVEEYMDWLHQSPVPKLLFWGTPGVLIPPAEAARLAKSLPNCKAVDIGPGLNLLQEDNPGLIGSEIARWLSTLEISG

SEQ ID NO: 2732 - protein, 277 aa, Synthetic construct
MFHYVDVGPRDGTPVLFLHGNPTSSYVWRNIIPHVAPTHRCIAPDLIGMGKSDKPDLGYFFDDHVRFMDAFIEALGLEEVVLVIHDWGSALGFHWAKRNPERVKGIAFMEFIRPIPTWDEWPEFARETFQAFRTTDVGRKLIIDQNVFIEGTLPMGVVRPLTEVEMDHYREPFLNPVDREPLWRFPNELPIAGEPANIVALVEEYMDWLHQSPVPKLLFWGTPGVLIPPAEAARLAKSLPNCKAVDIGPGLNLLQEDNPTLIGSEIARWLSTLEISG

SEQ ID NO: 2733 - protein, 277 aa, Synthetic construct
MFHYVDVGPRDGTPVLFLHGNPTSSYVWRNIIPHVAPTHRCIAPDLIGMGKSDKPDLGYFFDDHVRFMDAFIEALGLEEVVLVIHDWGSALGFHWAKRNPERVKGIAFMEFIRPIPTWDEWPEFARETFQAFRTTDVGRKLIIDQNVFIEGTLPMGVVRPLTEVEMDHYREPFLNPVDREPLWRFPNELPIAGEPANIVALVEEYMDWLHQSPVPKLLFWGTPGVLIPPAEAARLAKSLPNCKAVDIGPGLNLLQEDNPDAIGSEIARWLSTLEISG

SEQ ID NO: 2734 - protein, 277 aa, Synthetic construct
MFHYVDVGPRDGTPVLFLHGNPTSSYVWRNIIPHVAPTHRCIAPDLIGMGKSDKPDLGYFFDDHVRFMDAFIEALGLEEVVLVIHDWGSALGFHWAKRNPERVKGIAFMEFIRPIPTWDEWPEFARETFQAFRTTDVGRKLIIDQNVFIEGTLPMGVVRPLTEVEMDHYREPFLNPVDREPLWRFPNELPIAGEPANIVALVEEYMDWLHQSPVPKLLFWGTPGVLIPPAEAARLAKSLPNCKAVDIGPGLNLLQEDNPDVIGSEIARWLSTLEISG

SEQ ID NO: 2735 - protein, 277 aa, Synthetic construct
MFHYVDVGPRDGTPVLFLHGNPTSSYVWRNIIPHVAPTHRCIAPDLIGMGKSDKPDLGYFFDDHVRFMDAFIEALGLEEVVLVIHDWGSALGFHWAKRNPERVKGIAFMEFIRPIPTWDEWPEFARETFQAFRTTDVGRKLIIDQNVFIEGTLPMGVVRPLTEVEMDHYREPFLNPVDREPLWRFPNELPIAGEPANIVALVEEYMDWLHQSPVPKLLFWGTPGVLIPPAEAARLAKSLPNCKAVDIGPGLNLLQEDNPDEIGSEIARWLSTLEISG

SEQ ID NO: 2736 - protein, 277 aa, Synthetic construct
MFHYVDVGPRDGTPVLFLHGNPTSSYVWRNIIPHVAPTHRCIAPDLIGMGKSDKPDLGYFFDDHVRFMDAFIEALGLEEVVLVIHDWGSALGFHWAKRNPERVKGIAFMEFIRPIPTWDEWPEFARETFQAFRTTDVGRKLIIDQNVFIEGTLPMGVVRPLTEVEMDHYREPFLNPVDREPLWRFPNELPIAGEPANIVALVEEYMDWLHQSPVPKLLFWGTPGVLIPPAEAARLAKSLPNCKAVDIGPGLNLLQEDNPDRIGSEIARWLSTLEISG

SEQ ID NO: 2737 - protein, 277 aa, Synthetic construct
MFHYVDVGPRDGTPVLFLHGNPTSSYVWRNIIPHVAPTHRCIAPDLIGMGKSDKPDLGYFFDDHVRFMDAFIEALGLEEVVLVIHDWGSALGFHWAKRNPERVKGIAFMEFIRPIPTWDEWPEFARETFQAFRTTDVGRKLIIDQNVFIEGTLPMGVVRPLTEVEMDHYREPFLNPVDREPLWRFPNELPIAGEPANIVALVEEYMDWLHQSPVPKLLFWGTPGVLIPPAEAARLAKSLPNCKAVDIGPGLNLLQEDNPDQIGSEIARWLSTLEISG

SEQ ID NO: 2738 - protein, 277 aa, Synthetic construct
MFHYVDVGPRDGTPVLFLHGNPTSSYVWRNIIPHVAPTHRCIAPDLIGMGKSDKPDLGYFFDDHVRFMDAFIEALGLEEVVLVIHDWGSALGFHWAKRNPERVKGIAFMEFIRPIPTWDEWPEFARETFQAFRTTDVGRKLIIDQNVFIEGTLPMGVVRPLTEVEMDHYREPFLNPVDREPLWRFPNELPIAGEPANIVALVEEYMDWLHQSPVPKLLFWGTPGVLIPPAEAARLAKSLPNCKAVDIGPGLNLLQEDNPDTIGSEIARWLSTLEISG

SEQ ID NO: 2739 - protein, 277 aa, Synthetic construct
MFHYVDVGPRDGTPVLFLHGNPTSSYVWRNIIPHVAPTHRCIAPDLIGMGKSDKPDLGYFFDDHVRFMDAFIEALGLEEVVLVIHDWGSALGFHWAKRNPERVKGIAFMEFIRPIPTWDEWPEFARETFQAFRTTDVGRKLIIDQNVFIEGTLPMGVVRPLTEVEMDHYREPFLNPVDREPLWRFPNELPIAGEPANIVALVEEYMDWLHQSPVPKLLFWGTPGVLIPPAEAARLAKSLPNCKAVDIGPGLNLLQEDNPDLVGSEIARWLSTLEISG

SEQ ID NO: 2740 - protein, 277 aa, Synthetic construct
MFHYVDVGPRDGTPVLFLHGNPTSSYVWRNIIPHVAPTHRCIAPDLIGMGKSDKPDLGYFFDDHVRFMDAFIEALGLEEVVLVIHDWGSALGFHWAKRNPERVKGIAFMEFIRPIPTWDEWPEFARETFQAFRTTDVGRKLIIDQNVFIEGTLPMGVVRPLTEVEMDHYREPFLNPVDREPLWRFPNELPIAGEPANIVALVEEYMDWLHQSPVPKLLFWGTPGVLIPPAEAARLAKSLPNCKAVDIGPGLNLLQEDNPDLLGSEIARWLSTLEISG

SEQ ID NO: 2741 - protein, 277 aa, Synthetic construct
MFHYVDVGPRDGTPVLFLHGNPTSSYVWRNIIPHVAPTHRCIAPDLIGMGKSDKPDLGYFFDDHVRFMDAFIEALGLEEVVLVIHDWGSALGFHWAKRNPERVKGIAFMEFIRPIPTWDEWPEFARETFQAFRTTDVGRKLIIDQNVFIEGTLPMGVVRPLTEVEMDHYREPFLNPVDREPLWRFPNELPIAGEPANIVALVEEYMDWLHQSPVPKLLFWGTPGVLIPPAEAARLAKSLPNCKAVDIGPGLNLLQEDNPDLMGSEIARWLSTLEISG

SEQ ID NO: 2742 - protein, 277 aa, Synthetic construct
MFHYVDVGPRDGTPVLFLHGNPTSSYVWRNIIPHVAPTHRCIAPDLIGMGKSDKPDLGYFFDDHVRFMDAFIEALGLEEVVLVIHDWGSALGFHWAKRNPERVKGIAFMEFIRPIPTWDEWPEFARETFQAFRTTDVGRKLIIDQNVFIEGTLPMGVVRPLTEVEMDHYREPFLNPVDREPLWRFPNELPIAGEPANIVALVEEYMDWLHQSPVPKLLFWGTPGVLIPPAEAARLAKSLPNCKAVDIGPGLNLLQEDNPDLAGSEIARWLSTLEISG

SEQ ID NO: 2743 - protein, 277 aa, Synthetic construct
MFHYVDVGPRDGTPVLFLHGNPTSSYVWRNIIPHVAPTHRCIAPDLIGMGKSDKPDLGYFFDDHVRFMDAFIEALGLEEVVLVIHDWGSALGFHWAKRNPERVKGIAFMEFIRPIPTWDEWPEFARETFQAFRTTDVGRKLIIDQNVFIEGTLPMGVVRPLTEVEMDHYREPFLNPVDREPLWRFPNELPIAGEPANIVALVEEYMDWLHQSPVPKLLFWGTPGVLIPPAEAARLAKSLPNCKAVDIGPGLNLLQEDNPDLTGSEIARWLSTLEISG

SEQ ID NO: 2744 - protein, 277 aa, Synthetic construct
MFHYVDVGPRDGTPVLFLHGNPTSSYVWRNIIPHVAPTHRCIAPDLIGMGKSDKPDLGYFFDDHVRFMDAFIEALGLEEVVLVIHDWGSALGFHWAKRNPERVKGIAFMEFIRPIPTWDEWPEFARETFQAFRTTDVGRKLIIDQNVFIEGTLPMGVVRPLTEVEMDHYREPFLNPVDREPLWRFPNELPIAGEPANIVALVEEYMDWLHQSPVPKLLFWGTPGVLIPPAEAARLAKSLPNCKAVDIGPGLNLLQEDNPDLFGSEIARWLSTLEISG

SEQ ID NO: 2745 - protein, 277 aa, Synthetic construct
MFHYVDVGPRDGTPVLFLHGNPTSSYVWRNIIPHVAPTHRCIAPDLIGMGKSDKPDLGYFFDDHVRFMDAFIEALGLEEVVLVIHDWGSALGFHWAKRNPERVKGIAFMEFIRPIPTWDEWPEFARETFQAFRTTDVGRKLIIDQNVFIEGTLPMGVVRPLTEVEMDHYREPFLNPVDREPLWRFPNELPIAGEPANIVALVEEYMDWLHQSPVPKLLFWGTPGVLIPPAEAARLAKSLPNCKAVDIGPGLNLLQEDNPDLIASEIARWLSTLEISG

SEQ ID NO: 2746 - protein, 277 aa, Synthetic construct
MFHYVDVGPRDGTPVLFLHGNPTSSYVWRNIIPHVAPTHRCIAPDLIGMGKSDKPDLGYFFDDHVRFMDAFIEALGLEEVVLVIHDWGSALGFHWAKRNPERVKGIAFMEFIRPIPTWDEWPEFARETFQAFRTTDVGRKLIIDQNVFIEGTLPMGVVRPLTEVEMDHYREPFLNPVDREPLWRFPNELPIAGEPANIVALVEEYMDWLHQSPVPKLLFWGTPGVLIPPAEAARLAKSLPNCKAVDIGPGLNLLQEDNPDLISSEIARWLSTLEISG

SEQ ID NO: 2747 - protein, 277 aa, Synthetic construct
MFHYVDVGPRDGTPVLFLHGNPTSSYVWRNIIPHVAPTHRCIAPDLIGMGKSDKPDLGYFFDDHVRFMDAFIEALGLEEVVLVIHDWGSALGFHWAKRNPERVKGIAFMEFIRPIPTWDEWPEFARETFQAFRTTDVGRKLIIDQNVFIEGTLPMGVVRPLTEVEMDHYREPFLNPVDREPLWRFPNELPIAGEPANIVALVEEYMDWLHQSPVPKLLFWGTPGVLIPPAEAARLAKSLPNCKAVDIGPGLNLLQEDNPDLITSEIARWLSTLEISG

SEQ ID NO: 2748 - protein, 277 aa, Synthetic construct
MFHYVDVGPRDGTPVLFLHGNPTSSYVWRNIIPHVAPTHRCIAPDLIGMGKSDKPDLGYFFDDHVRFMDAFIEALGLEEVVLVIHDWGSALGFHWAKRNPERVKGIAFMEFIRPIPTWDEWPEFARETFQAFRTTDVGRKLIIDQNVFIEGTLPMGVVRPLTEVEMDHYREPFLNPVDREPLWRFPNELPIAGEPANIVALVEEYMDWLHQSPVPKLLFWGTPGVLIPPAEAARLAKSLPNCKAVDIGPGLNLLQEDNPDLIVSEIARWLSTLEISG

SEQ ID NO: 2749 - protein, 277 aa, Synthetic construct
MFHYVDVGPRDGTPVLFLHGNPTSSYVWRNIIPHVAPTHRCIAPDLIGMGKSDKPDLGYFFDDHVRFMDAFIEALGLEEVVLVIHDWGSALGFHWAKRNPERVKGIAFMEFIRPIPTWDEWPEFARETFQAFRTTDVGRKLIIDQNVFIEGTLPMGVVRPLTEVEMDHYREPFLNPVDREPLWRFPNELPIAGEPANIVALVEEYMDWLHQSPVPKLLFWGTPGVLIPPAEAARLAKSLPNCKAVDIGPGLNLLQEDNPDLICSEIARWLSTLEISG

SEQ ID NO: 2750 - protein, 277 aa, Synthetic construct
MFHYVDVGPRDGTPVLFLHGNPTSSYVWRNIIPHVAPTHRCIAPDLIGMGKSDKPDLGYFFDDHVRFMDAFIEALGLEEVVLVIHDWGSALGFHWAKRNPERVKGIAFMEFIRPIPTWDEWPEFARETFQAFRTTDVGRKLIIDQNVFIEGTLPMGVVRPLTEVEMDHYREPFLNPVDREPLWRFPNELPIAGEPANIVALVEEYMDWLHQSPVPKLLFWGTPGVLIPPAEAARLAKSLPNCKAVDIGPGLNLLQEDNPDLIRSEIARWLSTLEISG

SEQ ID NO: 2751 - protein, 277 aa, Synthetic construct
MFHYVDVGPRDGTPVLFLHGNPTSSYVWRNIIPHVAPTHRCIAPDLIGMGKSDKPDLGYFFDDHVRFMDAFIEALGLEEVVLVIHDWGSALGFHWAKRNPERVKGIAFMEFIRPIPTWDEWPEFARETFQAFRTTDVGRKLIIDQNVFIEGTLPMGVVRPLTEVEMDHYREPFLNPVDREPLWRFPNELPIAGEPANIVALVEEYMDWLHQSPVPKLLFWGTPGVLIPPAEAARLAKSLPNCKAVDIGPGLNLLQEDNPDLIGAEIARWLSTLEISG

SEQ ID NO: 2752 - protein, 277 aa, Synthetic construct
MFHYVDVGPRDGTPVLFLHGNPTSSYVWRNIIPHVAPTHRCIAPDLIGMGKSDKPDLGYFFDDHVRFMDAFIEALGLEEVVLVIHDWGSALGFHWAKRNPERVKGIAFMEFIRPIPTWDEWPEFARETFQAFRTTDVGRKLIIDQNVFIEGTLPMGVVRPLTEVEMDHYREPFLNPVDREPLWRFPNELPIAGEPANIVALVEEYMDWLHQSPVPKLLFWGTPGVLIPPAEAARLAKSLPNCKAVDIGPGLNLLQEDNPDLIGREIARWLSTLEISG

SEQ ID NO: 2753 - protein, 277 aa, Synthetic construct
MFHYVDVGPRDGTPVLFLHGNPTSSYVWRNIIPHVAPTHRCIAPDLIGMGKSDKPDLGYFFDDHVRFMDAFIEALGLEEVVLVIHDWGSALGFHWAKRNPERVKGIAFMEFIRPIPTWDEWPEFARETFQAFRTTDVGRKLIIDQNVFIEGTLPMGVVRPLTEVEMDHYREPFLNPVDREPLWRFPNELPIAGEPANIVALVEEYMDWLHQSPVPKLLFWGTPGVLIPPAEAARLAKSLPNCKAVDIGPGLNLLQEDNPDLIGEEIARWLSTLEISG

SEQ ID NO: 2754 - protein, 277 aa, Synthetic construct
MFHYVDVGPRDGTPVLFLHGNPTSSYVWRNIIPHVAPTHRCIAPDLIGMGKSDKPDLGYFFDDHVRFMDAFIEALGLEEVVLVIHDWGSALGFHWAKRNPERVKGIAFMEFIRPIPTWDEWPEFARETFQAFRTTDVGRKLIIDQNVFIEGTLPMGVVRPLTEVEMDHYREPFLNPVDREPLWRFPNELPIAGEPANIVALVEEYMDWLHQSPVPKLLFWGTPGVLIPPAEAARLAKSLPNCKAVDIGPGLNLLQEDNPDLIGQEIARWLSTLEISG

SEQ ID NO: 2755 - protein, 277 aa, Synthetic construct
MFHYVDVGPRDGTPVLFLHGNPTSSYVWRNIIPHVAPTHRCIAPDLIGMGKSDKPDLGYFFDDHVRFMDAFIEALGLEEVVLVIHDWGSALGFHWAKRNPERVKGIAFMEFIRPIPTWDEWPEFARETFQAFRTTDVGRKLIIDQNVFIEGTLPMGVVRPLTEVEMDHYREPFLNPVDREPLWRFPNELPIAGEPANIVALVEEYMDWLHQSPVPKLLFWGTPGVLIPPAEAARLAKSLPNCKAVDIGPGLNLLQEDNPDLIGKEIARWLSTLEISG

SEQ ID NO: 2756 - protein, 277 aa, Synthetic construct
MFHYVDVGPRDGTPVLFLHGNPTSSYVWRNIIPHVAPTHRCIAPDLIGMGKSDKPDLGYFFDDHVRFMDAFIEALGLEEVVLVIHDWGSALGFHWAKRNPERVKGIAFMEFIRPIPTWDEWPEFARETFQAFRTTDVGRKLIIDQNVFIEGTLPMGVVRPLTEVEMDHYREPFLNPVDREPLWRFPNELPIAGEPANIVALVEEYMDWLHQSPVPKLLFWGTPGVLIPPAEAARLAKSLPNCKAVDIGPGLNLLQEDNPDLIGTEIARWLSTLEISG

SEQ ID NO: 2757 - protein, 277 aa, Synthetic construct
MFHYVDVGPRDGTPVLFLHGNPTSSYVWRNIIPHVAPTHRCIAPDLIGMGKSDKPDLGYFFDDHVRFMDAFIEALGLEEVVLVIHDWGSALGFHWAKRNPERVKGIAFMEFIRPIPTWDEWPEFARETFQAFRTTDVGRKLIIDQNVFIEGTLPMGVVRPLTEVEMDHYREPFLNPVDREPLWRFPNELPIAGEPANIVALVEEYMDWLHQSPVPKLLFWGTPGVLIPPAEAARLAKSLPNCKAVDIGPGLNLLQEDNPDLIGSAIARWLSTLEISG

SEQ ID NO: 2758 - protein, 277 aa, Synthetic construct
MFHYVDVGPRDGTPVLFLHGNPTSSYVWRNIIPHVAPTHRCIAPDLIGMGKSDKPDLGYFFDDHVRFMDAFIEALGLEEVVLVIHDWGSALGFHWAKRNPERVKGIAFMEFIRPIPTWDEWPEFARETFQAFRTTDVGRKLIIDQNVFIEGTLPMGVVRPLTEVEMDHYREPFLNPVDREPLWRFPNELPIAGEPANIVALVEEYMDWLHQSPVPKLLFWGTPGVLIPPAEAARLAKSLPNCKAVDIGPGLNLLQEDNPDLIGSTIARWLSTLEISG

SEQ ID NO: 2759 - protein, 277 aa, Synthetic construct
MFHYVDVGPRDGTPVLFLHGNPTSSYVWRNIIPHVAPTHRCIAPDLIGMGKSDKPDLGYFFDDHVRFMDAFIEALGLEEVVLVIHDWGSALGFHWAKRNPERVKGIAFMEFIRPIPTWDEWPEFARETFQAFRTTDVGRKLIIDQNVFIEGTLPMGVVRPLTEVEMDHYREPFLNPVDREPLWRFPNELPIAGEPANIVALVEEYMDWLHQSPVPKLLFWGTPGVLIPPAEAARLAKSLPNCKAVDIGPGLNLLQEDNPDLIGSHIARWLSTLEISG

SEQ ID NO: 2760 - protein, 277 aa, Synthetic construct
MFHYVDVGPRDGTPVLFLHGNPTSSYVWRNIIPHVAPTHRCIAPDLIGMGKSDKPDLGYFFDDHVRFMDAFIEALGLEEVVLVIHDWGSALGFHWAKRNPERVKGIAFMEFIRPIPTWDEWPEFARETFQAFRTTDVGRKLIIDQNVFIEGTLPMGVVRPLTEVEMDHYREPFLNPVDREPLWRFPNELPIAGEPANIVALVEEYMDWLHQSPVPKLLFWGTPGVLIPPAEAARLAKSLPNCKAVDIGPGLNLLQEDNPDLIGSSIARWLSTLEISG

SEQ ID NO: 2761 - protein, 277 aa, Synthetic construct
MFHYVDVGPRDGTPVLFLHGNPTSSYVWRNIIPHVAPTHRCIAPDLIGMGKSDKPDLGYFFDDHVRFMDAFIEALGLEEVVLVIHDWGSALGFHWAKRNPERVKGIAFMEFIRPIPTWDEWPEFARETFQAFRTTDVGRKLIIDQNVFIEGTLPMGVVRPLTEVEMDHYREPFLNPVDREPLWRFPNELPIAGEPANIVALVEEYMDWLHQSPVPKLLFWGTPGVLIPPAEAARLAKSLPNCKAVDIGPGLNLLQEDNPDLIGSQIARWLSTLEISG

SEQ ID NO: 2762 - protein, 277 aa, Synthetic construct
MFHYVDVGPRDGTPVLFLHGNPTSSYVWRNIIPHVAPTHRCIAPDLIGMGKSDKPDLGYFFDDHVRFMDAFIEALGLEEVVLVIHDWGSALGFHWAKRNPERVKGIAFMEFIRPIPTWDEWPEFARETFQAFRTTDVGRKLIIDQNVFIEGTLPMGVVRPLTEVEMDHYREPFLNPVDREPLWRFPNELPIAGEPANIVALVEEYMDWLHQSPVPKLLFWGTPGVLIPPAEAARLAKSLPNCKAVDIGPGLNLLQEDNPDLIGSVIARWLSTLEISG

SEQ ID NO: 2763 - protein, 277 aa, Synthetic construct
MFHYVDVGPRDGTPVLFLHGNPTSSYVWRNIIPHVAPTHRCIAPDLIGMGKSDKPDLGYFFDDHVRFMDAFIEALGLEEVVLVIHDWGSALGFHWAKRNPERVKGIAFMEFIRPIPTWDEWPEFARETFQAFRTTDVGRKLIIDQNVFIEGTLPMGVVRPLTEVEMDHYREPFLNPVDREPLWRFPNELPIAGEPANIVALVEEYMDWLHQSPVPKLLFWGTPGVLIPPAEAARLAKSLPNCKAVDIGPGLNLLQEDNPDLIGSELARWLSTLEISG

SEQ ID NO: 2764 - protein, 277 aa, Synthetic construct
MFHYVDVGPRDGTPVLFLHGNPTSSYVWRNIIPHVAPTHRCIAPDLIGMGKSDKPDLGYFFDDHVRFMDAFIEALGLEEVVLVIHDWGSALGFHWAKRNPERVKGIAFMEFIRPIPTWDEWPEFARETFQAFRTTDVGRKLIIDQNVFIEGTLPMGVVRPLTEVEMDHYREPFLNPVDREPLWRFPNELPIAGEPANIVALVEEYMDWLHQSPVPKLLFWGTPGVLIPPAEAARLAKSLPNCKAVDIGPGLNLLQEDNPDLIGSEVARWLSTLEISG

SEQ ID NO: 2765 - protein, 277 aa, Synthetic construct
MFHYVDVGPRDGTPVLFLHGNPTSSYVWRNIIPHVAPTHRCIAPDLIGMGKSDKPDLGYFFDDHVRFMDAFIEALGLEEVVLVIHDWGSALGFHWAKRNPERVKGIAFMEFIRPIPTWDEWPEFARETFQAFRTTDVGRKLIIDQNVFIEGTLPMGVVRPLTEVEMDHYREPFLNPVDREPLWRFPNELPIAGEPANIVALVEEYMDWLHQSPVPKLLFWGTPGVLIPPAEAARLAKSLPNCKAVDIGPGLNLLQEDNPDLIGSEMARWLSTLEISG

SEQ ID NO: 2766 - protein, 277 aa, Synthetic construct
MFHYVDVGPRDGTPVLFLHGNPTSSYVWRNIIPHVAPTHRCIAPDLIGMGKSDKPDLGYFFDDHVRFMDAFIEALGLEEVVLVIHDWGSALGFHWAKRNPERVKGIAFMEFIRPIPTWDEWPEFARETFQAFRTTDVGRKLIIDQNVFIEGTLPMGVVRPLTEVEMDHYREPFLNPVDREPLWRFPNELPIAGEPANIVALVEEYMDWLHQSPVPKLLFWGTPGVLIPPAEAARLAKSLPNCKAVDIGPGLNLLQEDNPDLIGSEFARWLSTLEISG

SEQ ID NO: 2767 - protein, 277 aa, Synthetic construct
MFHYVDVGPRDGTPVLFLHGNPTSSYVWRNIIPHVAPTHRCIAPDLIGMGKSDKPDLGYFFDDHVRFMDAFIEALGLEEVVLVIHDWGSALGFHWAKRNPERVKGIAFMEFIRPIPTWDEWPEFARETFQAFRTTDVGRKLIIDQNVFIEGTLPMGVVRPLTEVEMDHYREPFLNPVDREPLWRFPNELPIAGEPANIVALVEEYMDWLHQSPVPKLLFWGTPGVLIPPAEAARLAKSLPNCKAVDIGPGLNLLQEDNPDLIGSETARWLSTLEISG

SEQ ID NO: 2768 - protein, 277 aa, Synthetic construct
MFHYVDVGPRDGTPVLFLHGNPTSSYVWRNIIPHVAPTHRCIAPDLIGMGKSDKPDLGYFFDDHVRFMDAFIEALGLEEVVLVIHDWGSALGFHWAKRNPERVKGIAFMEFIRPIPTWDEWPEFARETFQAFRTTDVGRKLIIDQNVFIEGTLPMGVVRPLTEVEMDHYREPFLNPVDREPLWRFPNELPIAGEPANIVALVEEYMDWLHQSPVPKLLFWGTPGVLIPPAEAARLAKSLPNCKAVDIGPGLNLLQEDNPDLIGSEAARWLSTLEISG

SEQ ID NO: 2769 - protein, 277 aa, Synthetic construct
MFHYVDVGPRDGTPVLFLHGNPTSSYVWRNIIPHVAPTHRCIAPDLIGMGKSDKPDLGYFFDDHVRFMDAFIEALGLEEVVLVIHDWGSALGFHWAKRNPERVKGIAFMEFIRPIPTWDEWPEFARETFQAFRTTDVGRKLIIDQNVFIEGTLPMGVVRPLTEVEMDHYREPFLNPVDREPLWRFPNELPIAGEPANIVALVEEYMDWLHQSPVPKLLFWGTPGVLIPPAEAARLAKSLPNCKAVDIGPGLNLLQEDNPDLIGSEISRWLSTLEISG

SEQ ID NO: 2770 - protein, 277 aa, Synthetic construct
MFHYVDVGPRDGTPVLFLHGNPTSSYVWRNIIPHVAPTHRCIAPDLIGMGKSDKPDLGYFFDDHVRFMDAFIEALGLEEVVLVIHDWGSALGFHWAKRNPERVKGIAFMEFIRPIPTWDEWPEFARETFQAFRTTDVGRKLIIDQNVFIEGTLPMGVVRPLTEVEMDHYREPFLNPVDREPLWRFPNELPIAGEPANIVALVEEYMDWLHQSPVPKLLFWGTPGVLIPPAEAARLAKSLPNCKAVDIGPGLNLLQEDNPDLIGSEIGRWLSTLEISG

SEQ ID NO: 2771 - protein, 277 aa, Synthetic construct
MFHYVDVGPRDGTPVLFLHGNPTSSYVWRNIIPHVAPTHRCIAPDLIGMGKSDKPDLGYFFDDHVRFMDAFIEALGLEEVVLVIHDWGSALGFHWAKRNPERVKGIAFMEFIRPIPTWDEWPEFARETFQAFRTTDVGRKLIIDQNVFIEGTLPMGVVRPLTEVEMDHYREPFLNPVDREPLWRFPNELPIAGEPANIVALVEEYMDWLHQSPVPKLLFWGTPGVLIPPAEAARLAKSLPNCKAVDIGPGLNLLQEDNPDLIGSEITRWLSTLEISG

SEQ ID NO: 2772 - protein, 277 aa, Synthetic construct
MFHYVDVGPRDGTPVLFLHGNPTSSYVWRNIIPHVAPTHRCIAPDLIGMGKSDKPDLGYFFDDHVRFMDAFIEALGLEEVVLVIHDWGSALGFHWAKRNPERVKGIAFMEFIRPIPTWDEWPEFARETFQAFRTTDVGRKLIIDQNVFIEGTLPMGVVRPLTEVEMDHYREPFLNPVDREPLWRFPNELPIAGEPANIVALVEEYMDWLHQSPVPKLLFWGTPGVLIPPAEAARLAKSLPNCKAVDIGPGLNLLQEDNPDLIGSEINRWLSTLEISG

SEQ ID NO: 2773 - protein, 277 aa, Synthetic construct
MFHYVDVGPRDGTPVLFLHGNPTSSYVWRNIIPHVAPTHRCIAPDLIGMGKSDKPDLGYFFDDHVRFMDAFIEALGLEEVVLVIHDWGSALGFHWAKRNPERVKGIAFMEFIRPIPTWDEWPEFARETFQAFRTTDVGRKLIIDQNVFIEGTLPMGVVRPLTEVEMDHYREPFLNPVDREPLWRFPNELPIAGEPANIVALVEEYMDWLHQSPVPKLLFWGTPGVLIPPAEAARLAKSLPNCKAVDIGPGLNLLQEDNPDLIGSEIRRWLSTLEISG

SEQ ID NO: 2774 - protein, 277 aa, Synthetic construct
MFHYVDVGPRDGTPVLFLHGNPTSSYVWRNIIPHVAPTHRCIAPDLIGMGKSDKPDLGYFFDDHVRFMDAFIEALGLEEVVLVIHDWGSALGFHWAKRNPERVKGIAFMEFIRPIPTWDEWPEFARETFQAFRTTDVGRKLIIDQNVFIEGTLPMGVVRPLTEVEMDHYREPFLNPVDREPLWRFPNELPIAGEPANIVALVEEYMDWLHQSPVPKLLFWGTPGVLIPPAEAARLAKSLPNCKAVDIGPGLNLLQEDNPDLIGSEIVRWLSTLEISG

SEQ ID NO: 2775 - protein, 277 aa, Synthetic construct
MFHYVDVGPRDGTPVLFLHGNPTSSYVWRNIIPHVAPTHRCIAPDLIGMGKSDKPDLGYFFDDHVRFMDAFIEALGLEEVVLVIHDWGSALGFHWAKRNPERVKGIAFMEFIRPIPTWDEWPEFARETFQAFRTTDVGRKLIIDQNVFIEGTLPMGVVRPLTEVEMDHYREPFLNPVDREPLWRFPNELPIAGEPANIVALVEEYMDWLHQSPVPKLLFWGTPGVLIPPAEAARLAKSLPNCKAVDIGPGLNLLQEDNPDLIGSEIAAWLSTLEISG

SEQ ID NO: 2776 - protein, 277 aa, Synthetic construct
MFHYVDVGPRDGTPVLFLHGNPTSSYVWRNIIPHVAPTHRCIAPDLIGMGKSDKPDLGYFFDDHVRFMDAFIEALGLEEVVLVIHDWGSALGFHWAKRNPERVKGIAFMEFIRPIPTWDEWPEFARETFQAFRTTDVGRKLIIDQNVFIEGTLPMGVVRPLTEVEMDHYREPFLNPVDREPLWRFPNELPIAGEPANIVALVEEYMDWLHQSPVPKLLFWGTPGVLIPPAEAARLAKSLPNCKAVDIGPGLNLLQEDNPDLIGSEIADWLSTLEISG

SEQ ID NO: 2777 - protein, 277 aa, Synthetic construct
MFHYVDVGPRDGTPVLFLHGNPTSSYVWRNIIPHVAPTHRCIAPDLIGMGKSDKPDLGYFFDDHVRFMDAFIEALGLEEVVLVIHDWGSALGFHWAKRNPERVKGIAFMEFIRPIPTWDEWPEFARETFQAFRTTDVGRKLIIDQNVFIEGTLPMGVVRPLTEVEMDHYREPFLNPVDREPLWRFPNELPIAGEPANIVALVEEYMDWLHQSPVPKLLFWGTPGVLIPPAEAARLAKSLPNCKAVDIGPGLNLLQEDNPDLIGSEIASWLSTLEISG

SEQ ID NO: 2778 - protein, 277 aa, Synthetic construct
MFHYVDVGPRDGTPVLFLHGNPTSSYVWRNIIPHVAPTHRCIAPDLIGMGKSDKPDLGYFFDDHVRFMDAFIEALGLEEVVLVIHDWGSALGFHWAKRNPERVKGIAFMEFIRPIPTWDEWPEFARETFQAFRTTDVGRKLIIDQNVFIEGTLPMGVVRPLTEVEMDHYREPFLNPVDREPLWRFPNELPIAGEPANIVALVEEYMDWLHQSPVPKLLFWGTPGVLIPPAEAARLAKSLPNCKAVDIGPGLNLLQEDNPDLIGSEIAEWLSTLEISG

SEQ ID NO: 2779 - protein, 277 aa, Synthetic construct
MFHYVDVGPRDGTPVLFLHGNPTSSYVWRNIIPHVAPTHRCIAPDLIGMGKSDKPDLGYFFDDHVRFMDAFIEALGLEEVVLVIHDWGSALGFHWAKRNPERVKGIAFMEFIRPIPTWDEWPEFARETFQAFRTTDVGRKLIIDQNVFIEGTLPMGVVRPLTEVEMDHYREPFLNPVDREPLWRFPNELPIAGEPANIVALVEEYMDWLHQSPVPKLLFWGTPGVLIPPAEAARLAKSLPNCKAVDIGPGLNLLQEDNPDLIGSEIATWLSTLEISG

SEQ ID NO: 2780 - protein, 277 aa, Synthetic construct
MFHYVDVGPRDGTPVLFLHGNPTSSYVWRNIIPHVAPTHRCIAPDLIGMGKSDKPDLGYFFDDHVRFMDAFIEALGLEEVVLVIHDWGSALGFHWAKRNPERVKGIAFMEFIRPIPTWDEWPEFARETFQAFRTTDVGRKLIIDQNVFIEGTLPMGVVRPLTEVEMDHYREPFLNPVDREPLWRFPNELPIAGEPANIVALVEEYMDWLHQSPVPKLLFWGTPGVLIPPAEAARLAKSLPNCKAVDIGPGLNLLQEDNPDLIGSEIAGWLSTLEISG

SEQ ID NO: 2781 - protein, 277 aa, Synthetic construct
MFHYVDVGPRDGTPVLFLHGNPTSSYVWRNIIPHVAPTHRCIAPDLIGMGKSDKPDLGYFFDDHVRFMDAFIEALGLEEVVLVIHDWGSALGFHWAKRNPERVKGIAFMEFIRPIPTWDEWPEFARETFQAFRTTDVGRKLIIDQNVFIEGTLPMGVVRPLTEVEMDHYREPFLNPVDREPLWRFPNELPIAGEPANIVALVEEYMDWLHQSPVPKLLFWGTPGVLIPPAEAARLAKSLPNCKAVDIGPGLNLLQEDNPDLIGSEIARFLSTLEISG

SEQ ID NO: 2782 - protein, 277 aa, Synthetic construct
MFHYVDVGPRDGTPVLFLHGNPTSSYVWRNIIPHVAPTHRCIAPDLIGMGKSDKPDLGYFFDDHVRFMDAFIEALGLEEVVLVIHDWGSALGFHWAKRNPERVKGIAFMEFIRPIPTWDEWPEFARETFQAFRTTDVGRKLIIDQNVFIEGTLPMGVVRPLTEVEMDHYREPFLNPVDREPLWRFPNELPIAGEPANIVALVEEYMDWLHQSPVPKLLFWGTPGVLIPPAEAARLAKSLPNCKAVDIGPGLNLLQEDNPDLIGSEIARYLSTLEISG

SEQ ID NO: 2783 - protein, 277 aa, Synthetic construct
MFHYVDVGPRDGTPVLFLHGNPTSSYVWRNIIPHVAPTHRCIAPDLIGMGKSDKPDLGYFFDDHVRFMDAFIEALGLEEVVLVIHDWGSALGFHWAKRNPERVKGIAFMEFIRPIPTWDEWPEFARETFQAFRTTDVGRKLIIDQNVFIEGTLPMGVVRPLTEVEMDHYREPFLNPVDREPLWRFPNELPIAGEPANIVALVEEYMDWLHQSPVPKLLFWGTPGVLIPPAEAARLAKSLPNCKAVDIGPGLNLLQEDNPDLIGSEIARLLSTLEISG

SEQ ID NO: 2784 - protein, 277 aa, Synthetic construct
MFHYVDVGPRDGTPVLFLHGNPTSSYVWRNIIPHVAPTHRCIAPDLIGMGKSDKPDLGYFFDDHVRFMDAFIEALGLEEVVLVIHDWGSALGFHWAKRNPERVKGIAFMEFIRPIPTWDEWPEFARETFQAFRTTDVGRKLIIDQNVFIEGTLPMGVVRPLTEVEMDHYREPFLNPVDREPLWRFPNELPIAGEPANIVALVEEYMDWLHQSPVPKLLFWGTPGVLIPPAEAARLAKSLPNCKAVDIGPGLNLLQEDNPDLIGSEIARHLSTLEISG

SEQ ID NO: 2785 - protein, 277 aa, Synthetic construct
MFHYVDVGPRDGTPVLFLHGNPTSSYVWRNIIPHVAPTHRCIAPDLIGMGKSDKPDLGYFFDDHVRFMDAFIEALGLEEVVLVIHDWGSALGFHWAKRNPERVKGIAFMEFIRPIPTWDEWPEFARETFQAFRTTDVGRKLIIDQNVFIEGTLPMGVVRPLTEVEMDHYREPFLNPVDREPLWRFPNELPIAGEPANIVALVEEYMDWLHQSPVPKLLFWGTPGVLIPPAEAARLAKSLPNCKAVDIGPGLNLLQEDNPDLIGSEIARVLSTLEISG

SEQ ID NO: 2786 - protein, 277 aa, Synthetic construct
MFHYVDVGPRDGTPVLFLHGNPTSSYVWRNIIPHVAPTHRCIAPDLIGMGKSDKPDLGYFFDDHVRFMDAFIEALGLEEVVLVIHDWGSALGFHWAKRNPERVKGIAFMEFIRPIPTWDEWPEFARETFQAFRTTDVGRKLIIDQNVFIEGTLPMGVVRPLTEVEMDHYREPFLNPVDREPLWRFPNELPIAGEPANIVALVEEYMDWLHQSPVPKLLFWGTPGVLIPPAEAARLAKSLPNCKAVDIGPGLNLLQEDNPDLIGSEIARMLSTLEISG

SEQ ID NO: 2787 - protein, 277 aa, Synthetic construct
MFHYVDVGPRDGTPVLFLHGNPTSSYVWRNIIPHVAPTHRCIAPDLIGMGKSDKPDLGYFFDDHVRFMDAFIEALGLEEVVLVIHDWGSALGFHWAKRNPERVKGIAFMEFIRPIPTWDEWPEFARETFQAFRTTDVGRKLIIDQNVFIEGTLPMGVVRPLTEVEMDHYREPFLNPVDREPLWRFPNELPIAGEPANIVALVEEYMDWLHQSPVPKLLFWGTPGVLIPPAEAARLAKSLPNCKAVDIGPGLNLLQEDNPDLIGSEIARWISTLEISG

SEQ ID NO: 2788 - protein, 277 aa, Synthetic construct
MFHYVDVGPRDGTPVLFLHGNPTSSYVWRNIIPHVAPTHRCIAPDLIGMGKSDKPDLGYFFDDHVRFMDAFIEALGLEEVVLVIHDWGSALGFHWAKRNPERVKGIAFMEFIRPIPTWDEWPEFARETFQAFRTTDVGRKLIIDQNVFIEGTLPMGVVRPLTEVEMDHYREPFLNPVDREPLWRFPNELPIAGEPANIVALVEEYMDWLHQSPVPKLLFWGTPGVLIPPAEAARLAKSLPNCKAVDIGPGLNLLQEDNPDLIGSEIARWVSTLEISG

SEQ ID NO: 2789 - protein, 277 aa, Synthetic construct
MFHYVDVGPRDGTPVLFLHGNPTSSYVWRNIIPHVAPTHRCIAPDLIGMGKSDKPDLGYFFDDHVRFMDAFIEALGLEEVVLVIHDWGSALGFHWAKRNPERVKGIAFMEFIRPIPTWDEWPEFARETFQAFRTTDVGRKLIIDQNVFIEGTLPMGVVRPLTEVEMDHYREPFLNPVDREPLWRFPNELPIAGEPANIVALVEEYMDWLHQSPVPKLLFWGTPGVLIPPAEAARLAKSLPNCKAVDIGPGLNLLQEDNPDLIGSEIARWFSTLEISG

SEQ ID NO: 2790 - protein, 277 aa, Synthetic construct
MFHYVDVGPRDGTPVLFLHGNPTSSYVWRNIIPHVAPTHRCIAPDLIGMGKSDKPDLGYFFDDHVRFMDAFIEALGLEEVVLVIHDWGSALGFHWAKRNPERVKGIAFMEFIRPIPTWDEWPEFARETFQAFRTTDVGRKLIIDQNVFIEGTLPMGVVRPLTEVEMDHYREPFLNPVDREPLWRFPNELPIAGEPANIVALVEEYMDWLHQSPVPKLLFWGTPGVLIPPAEAARLAKSLPNCKAVDIGPGLNLLQEDNPDLIGSEIARWMSTLEISG

SEQ ID NO: 2791 - protein, 277 aa, Synthetic construct
MFHYVDVGPRDGTPVLFLHGNPTSSYVWRNIIPHVAPTHRCIAPDLIGMGKSDKPDLGYFFDDHVRFMDAFIEALGLEEVVLVIHDWGSALGFHWAKRNPERVKGIAFMEFIRPIPTWDEWPEFARETFQAFRTTDVGRKLIIDQNVFIEGTLPMGVVRPLTEVEMDHYREPFLNPVDREPLWRFPNELPIAGEPANIVALVEEYMDWLHQSPVPKLLFWGTPGVLIPPAEAARLAKSLPNCKAVDIGPGLNLLQEDNPDLIGSEIARWASTLEISG

SEQ ID NO: 2792 - protein, 277 aa, Synthetic construct
MFHYVDVGPRDGTPVLFLHGNPTSSYVWRNIIPHVAPTHRCIAPDLIGMGKSDKPDLGYFFDDHVRFMDAFIEALGLEEVVLVIHDWGSALGFHWAKRNPERVKGIAFMEFIRPIPTWDEWPEFARETFQAFRTTDVGRKLIIDQNVFIEGTLPMGVVRPLTEVEMDHYREPFLNPVDREPLWRFPNELPIAGEPANIVALVEEYMDWLHQSPVPKLLFWGTPGVLIPPAEAARLAKSLPNCKAVDIGPGLNLLQEDNPDLIGSEIARWYSTLEISG

SEQ ID NO: 2793 - protein, 277 aa, Synthetic construct
MFHYVDVGPRDGTPVLFLHGNPTSSYVWRNIIPHVAPTHRCIAPDLIGMGKSDKPDLGYFFDDHVRFMDAFIEALGLEEVVLVIHDWGSALGFHWAKRNPERVKGIAFMEFIRPIPTWDEWPEFARETFQAFRTTDVGRKLIIDQNVFIEGTLPMGVVRPLTEVEMDHYREPFLNPVDREPLWRFPNELPIAGEPANIVALVEEYMDWLHQSPVPKLLFWGTPGVLIPPAEAARLAKSLPNCKAVDIGPGLNLLQEDNPDLIGSEIARWLATLEISG

SEQ ID NO: 2794 - protein, 277 aa, Synthetic construct
MFHYVDVGPRDGTPVLFLHGNPTSSYVWRNIIPHVAPTHRCIAPDLIGMGKSDKPDLGYFFDDHVRFMDAFIEALGLEEVVLVIHDWGSALGFHWAKRNPERVKGIAFMEFIRPIPTWDEWPEFARETFQAFRTTDVGRKLIIDQNVFIEGTLPMGVVRPLTEVEMDHYREPFLNPVDREPLWRFPNELPIAGEPANIVALVEEYMDWLHQSPVPKLLFWGTPGVLIPPAEAARLAKSLPNCKAVDIGPGLNLLQEDNPDLIGSEIARWLETLEISG

SEQ ID NO: 2795 - protein, 277 aa, Synthetic construct
MFHYVDVGPRDGTPVLFLHGNPTSSYVWRNIIPHVAPTHRCIAPDLIGMGKSDKPDLGYFFDDHVRFMDAFIEALGLEEVVLVIHDWGSALGFHWAKRNPERVKGIAFMEFIRPIPTWDEWPEFARETFQAFRTTDVGRKLIIDQNVFIEGTLPMGVVRPLTEVEMDHYREPFLNPVDREPLWRFPNELPIAGEPANIVALVEEYMDWLHQSPVPKLLFWGTPGVLIPPAEAARLAKSLPNCKAVDIGPGLNLLQEDNPDLIGSEIARWLGTLEISG

SEQ ID NO: 2796 - protein, 277 aa, Synthetic construct
MFHYVDVGPRDGTPVLFLHGNPTSSYVWRNIIPHVAPTHRCIAPDLIGMGKSDKPDLGYFFDDHVRFMDAFIEALGLEEVVLVIHDWGSALGFHWAKRNPERVKGIAFMEFIRPIPTWDEWPEFARETFQAFRTTDVGRKLIIDQNVFIEGTLPMGVVRPLTEVEMDHYREPFLNPVDREPLWRFPNELPIAGEPANIVALVEEYMDWLHQSPVPKLLFWGTPGVLIPPAEAARLAKSLPNCKAVDIGPGLNLLQEDNPDLIGSEIARWLDTLEISG

SEQ ID NO: 2797 - protein, 277 aa, Synthetic construct
MFHYVDVGPRDGTPVLFLHGNPTSSYVWRNIIPHVAPTHRCIAPDLIGMGKSDKPDLGYFFDDHVRFMDAFIEALGLEEVVLVIHDWGSALGFHWAKRNPERVKGIAFMEFIRPIPTWDEWPEFARETFQAFRTTDVGRKLIIDQNVFIEGTLPMGVVRPLTEVEMDHYREPFLNPVDREPLWRFPNELPIAGEPANIVALVEEYMDWLHQSPVPKLLFWGTPGVLIPPAEAARLAKSLPNCKAVDIGPGLNLLQEDNPDLIGSEIARWLKTLEISG

SEQ ID NO: 2798 - protein, 277 aa, Synthetic construct
MFHYVDVGPRDGTPVLFLHGNPTSSYVWRNIIPHVAPTHRCIAPDLIGMGKSDKPDLGYFFDDHVRFMDAFIEALGLEEVVLVIHDWGSALGFHWAKRNPERVKGIAFMEFIRPIPTWDEWPEFARETFQAFRTTDVGRKLIIDQNVFIEGTLPMGVVRPLTEVEMDHYREPFLNPVDREPLWRFPNELPIAGEPANIVALVEEYMDWLHQSPVPKLLFWGTPGVLIPPAEAARLAKSLPNCKAVDIGPGLNLLQEDNPDLIGSEIARWLRTLEISG

SEQ ID NO: 2799 - protein, 277 aa, Synthetic construct
MFHYVDVGPRDGTPVLFLHGNPTSSYVWRNIIPHVAPTHRCIAPDLIGMGKSDKPDLGYFFDDHVRFMDAFIEALGLEEVVLVIHDWGSALGFHWAKRNPERVKGIAFMEFIRPIPTWDEWPEFARETFQAFRTTDVGRKLIIDQNVFIEGTLPMGVVRPLTEVEMDHYREPFLNPVDREPLWRFPNELPIAGEPANIVALVEEYMDWLHQSPVPKLLFWGTPGVLIPPAEAARLAKSLPNCKAVDIGPGLNLLQEDNPDLIGSEIARWLSELEISG

SEQ ID NO: 2800 - protein, 277 aa, Synthetic construct
MFHYVDVGPRDGTPVLFLHGNPTSSYVWRNIIPHVAPTHRCIAPDLIGMGKSDKPDLGYFFDDHVRFMDAFIEALGLEEVVLVIHDWGSALGFHWAKRNPERVKGIAFMEFIRPIPTWDEWPEFARETFQAFRTTDVGRKLIIDQNVFIEGTLPMGVVRPLTEVEMDHYREPFLNPVDREPLWRFPNELPIAGEPANIVALVEEYMDWLHQSPVPKLLFWGTPGVLIPPAEAARLAKSLPNCKAVDIGPGLNLLQEDNPDLIGSEIARWLSSLEISG

SEQ ID NO: 2801 - protein, 277 aa, Synthetic construct
MFHYVDVGPRDGTPVLFLHGNPTSSYVWRNIIPHVAPTHRCIAPDLIGMGKSDKPDLGYFFDDHVRFMDAFIEALGLEEVVLVIHDWGSALGFHWAKRNPERVKGIAFMEFIRPIPTWDEWPEFARETFQAFRTTDVGRKLIIDQNVFIEGTLPMGVVRPLTEVEMDHYREPFLNPVDREPLWRFPNELPIAGEPANIVALVEEYMDWLHQSPVPKLLFWGTPGVLIPPAEAARLAKSLPNCKAVDIGPGLNLLQEDNPDLIGSEIARWLSGLEISG

SEQ ID NO: 2802 - protein, 277 aa, Synthetic construct
MFHYVDVGPRDGTPVLFLHGNPTSSYVWRNIIPHVAPTHRCIAPDLIGMGKSDKPDLGYFFDDHVRFMDAFIEALGLEEVVLVIHDWGSALGFHWAKRNPERVKGIAFMEFIRPIPTWDEWPEFARETFQAFRTTDVGRKLIIDQNVFIEGTLPMGVVRPLTEVEMDHYREPFLNPVDREPLWRFPNELPIAGEPANIVALVEEYMDWLHQSPVPKLLFWGTPGVLIPPAEAARLAKSLPNCKAVDIGPGLNLLQEDNPDLIGSEIARWLSDLEISG

SEQ ID NO: 2803 - protein, 277 aa, Synthetic construct
MFHYVDVGPRDGTPVLFLHGNPTSSYVWRNIIPHVAPTHRCIAPDLIGMGKSDKPDLGYFFDDHVRFMDAFIEALGLEEVVLVIHDWGSALGFHWAKRNPERVKGIAFMEFIRPIPTWDEWPEFARETFQAFRTTDVGRKLIIDQNVFIEGTLPMGVVRPLTEVEMDHYREPFLNPVDREPLWRFPNELPIAGEPANIVALVEEYMDWLHQSPVPKLLFWGTPGVLIPPAEAARLAKSLPNCKAVDIGPGLNLLQEDNPDLIGSEIARWLSALEISG

SEQ ID NO: 2804 - protein, 277 aa, Synthetic construct
MFHYVDVGPRDGTPVLFLHGNPTSSYVWRNIIPHVAPTHRCIAPDLIGMGKSDKPDLGYFFDDHVRFMDAFIEALGLEEVVLVIHDWGSALGFHWAKRNPERVKGIAFMEFIRPIPTWDEWPEFARETFQAFRTTDVGRKLIIDQNVFIEGTLPMGVVRPLTEVEMDHYREPFLNPVDREPLWRFPNELPIAGEPANIVALVEEYMDWLHQSPVPKLLFWGTPGVLIPPAEAARLAKSLPNCKAVDIGPGLNLLQEDNPDLIGSEIARWLSQLEISG

SEQ ID NO: 2805 - protein, 277 aa, Synthetic construct
MFHYVDVGPRDGTPVLFLHGNPTSSYVWRNIIPHVAPTHRCIAPDLIGMGKSDKPDLGYFFDDHVRFMDAFIEALGLEEVVLVIHDWGSALGFHWAKRNPERVKGIAFMEFIRPIPTWDEWPEFARETFQAFRTTDVGRKLIIDQNVFIEGTLPMGVVRPLTEVEMDHYREPFLNPVDREPLWRFPNELPIAGEPANIVALVEEYMDWLHQSPVPKLLFWGTPGVLIPPAEAARLAKSLPNCKAVDIGPGLNLLQEDNPDLIGSEIARWLSTIEISG

SEQ ID NO: 2806 - protein, 277 aa, Synthetic construct
MFHYVDVGPRDGTPVLFLHGNPTSSYVWRNIIPHVAPTHRCIAPDLIGMGKSDKPDLGYFFDDHVRFMDAFIEALGLEEVVLVIHDWGSALGFHWAKRNPERVKGIAFMEFIRPIPTWDEWPEFARETFQAFRTTDVGRKLIIDQNVFIEGTLPMGVVRPLTEVEMDHYREPFLNPVDREPLWRFPNELPIAGEPANIVALVEEYMDWLHQSPVPKLLFWGTPGVLIPPAEAARLAKSLPNCKAVDIGPGLNLLQEDNPDLIGSEIARWLSTVEISG

SEQ ID NO: 2807 - protein, 277 aa, Synthetic construct
MFHYVDVGPRDGTPVLFLHGNPTSSYVWRNIIPHVAPTHRCIAPDLIGMGKSDKPDLGYFFDDHVRFMDAFIEALGLEEVVLVIHDWGSALGFHWAKRNPERVKGIAFMEFIRPIPTWDEWPEFARETFQAFRTTDVGRKLIIDQNVFIEGTLPMGVVRPLTEVEMDHYREPFLNPVDREPLWRFPNELPIAGEPANIVALVEEYMDWLHQSPVPKLLFWGTPGVLIPPAEAARLAKSLPNCKAVDIGPGLNLLQEDNPDLIGSEIARWLSTQEISG

SEQ ID NO: 2808 - protein, 277 aa, Synthetic construct
MFHYVDVGPRDGTPVLFLHGNPTSSYVWRNIIPHVAPTHRCIAPDLIGMGKSDKPDLGYFFDDHVRFMDAFIEALGLEEVVLVIHDWGSALGFHWAKRNPERVKGIAFMEFIRPIPTWDEWPEFARETFQAFRTTDVGRKLIIDQNVFIEGTLPMGVVRPLTEVEMDHYREPFLNPVDREPLWRFPNELPIAGEPANIVALVEEYMDWLHQSPVPKLLFWGTPGVLIPPAEAARLAKSLPNCKAVDIGPGLNLLQEDNPDLIGSEIARWLSTHEISG

SEQ ID NO: 2809 - protein, 277 aa, Synthetic construct
MFHYVDVGPRDGTPVLFLHGNPTSSYVWRNIIPHVAPTHRCIAPDLIGMGKSDKPDLGYFFDDHVRFMDAFIEALGLEEVVLVIHDWGSALGFHWAKRNPERVKGIAFMEFIRPIPTWDEWPEFARETFQAFRTTDVGRKLIIDQNVFIEGTLPMGVVRPLTEVEMDHYREPFLNPVDREPLWRFPNELPIAGEPANIVALVEEYMDWLHQSPVPKLLFWGTPGVLIPPAEAARLAKSLPNCKAVDIGPGLNLLQEDNPDLIGSEIARWLSTTEISG

SEQ ID NO: 2810 - protein, 277 aa, Synthetic construct
MFHYVDVGPRDGTPVLFLHGNPTSSYVWRNIIPHVAPTHRCIAPDLIGMGKSDKPDLGYFFDDHVRFMDAFIEALGLEEVVLVIHDWGSALGFHWAKRNPERVKGIAFMEFIRPIPTWDEWPEFARETFQAFRTTDVGRKLIIDQNVFIEGTLPMGVVRPLTEVEMDHYREPFLNPVDREPLWRFPNELPIAGEPANIVALVEEYMDWLHQSPVPKLLFWGTPGVLIPPAEAARLAKSLPNCKAVDIGPGLNLLQEDNPDLIGSEIARWLSTAEISG

SEQ ID NO: 2811 - protein, 277 aa, Synthetic construct
MFHYVDVGPRDGTPVLFLHGNPTSSYVWRNIIPHVAPTHRCIAPDLIGMGKSDKPDLGYFFDDHVRFMDAFIEALGLEEVVLVIHDWGSALGFHWAKRNPERVKGIAFMEFIRPIPTWDEWPEFARETFQAFRTTDVGRKLIIDQNVFIEGTLPMGVVRPLTEVEMDHYREPFLNPVDREPLWRFPNELPIAGEPANIVALVEEYMDWLHQSPVPKLLFWGTPGVLIPPAEAARLAKSLPNCKAVDIGPGLNLLQEDNPDLIGSEIARWLSTLPISG

SEQ ID NO: 2812 - protein, 277 aa, Synthetic construct
MFHYVDVGPRDGTPVLFLHGNPTSSYVWRNIIPHVAPTHRCIAPDLIGMGKSDKPDLGYFFDDHVRFMDAFIEALGLEEVVLVIHDWGSALGFHWAKRNPERVKGIAFMEFIRPIPTWDEWPEFARETFQAFRTTDVGRKLIIDQNVFIEGTLPMGVVRPLTEVEMDHYREPFLNPVDREPLWRFPNELPIAGEPANIVALVEEYMDWLHQSPVPKLLFWGTPGVLIPPAEAARLAKSLPNCKAVDIGPGLNLLQEDNPDLIGSEIARWLSTLGISG

SEQ ID NO: 2813 - protein, 277 aa, Synthetic construct
MFHYVDVGPRDGTPVLFLHGNPTSSYVWRNIIPHVAPTHRCIAPDLIGMGKSDKPDLGYFFDDHVRFMDAFIEALGLEEVVLVIHDWGSALGFHWAKRNPERVKGIAFMEFIRPIPTWDEWPEFARETFQAFRTTDVGRKLIIDQNVFIEGTLPMGVVRPLTEVEMDHYREPFLNPVDREPLWRFPNELPIAGEPANIVALVEEYMDWLHQSPVPKLLFWGTPGVLIPPAEAARLAKSLPNCKAVDIGPGLNLLQEDNPDLIGSEIARWLSTLDISG

SEQ ID NO: 2814 - protein, 277 aa, Synthetic construct
MFHYVDVGPRDGTPVLFLHGNPTSSYVWRNIIPHVAPTHRCIAPDLIGMGKSDKPDLGYFFDDHVRFMDAFIEALGLEEVVLVIHDWGSALGFHWAKRNPERVKGIAFMEFIRPIPTWDEWPEFARETFQAFRTTDVGRKLIIDQNVFIEGTLPMGVVRPLTEVEMDHYREPFLNPVDREPLWRFPNELPIAGEPANIVALVEEYMDWLHQSPVPKLLFWGTPGVLIPPAEAARLAKSLPNCKAVDIGPGLNLLQEDNPDLIGSEIARWLSTLSISG

SEQ ID NO: 2815 - protein, 277 aa, Synthetic construct
MFHYVDVGPRDGTPVLFLHGNPTSSYVWRNIIPHVAPTHRCIAPDLIGMGKSDKPDLGYFFDDHVRFMDAFIEALGLEEVVLVIHDWGSALGFHWAKRNPERVKGIAFMEFIRPIPTWDEWPEFARETFQAFRTTDVGRKLIIDQNVFIEGTLPMGVVRPLTEVEMDHYREPFLNPVDREPLWRFPNELPIAGEPANIVALVEEYMDWLHQSPVPKLLFWGTPGVLIPPAEAARLAKSLPNCKAVDIGPGLNLLQEDNPDLIGSEIARWLSTLAISG

SEQ ID NO: 2816 - protein, 277 aa, Synthetic construct
MFHYVDVGPRDGTPVLFLHGNPTSSYVWRNIIPHVAPTHRCIAPDLIGMGKSDKPDLGYFFDDHVRFMDAFIEALGLEEVVLVIHDWGSALGFHWAKRNPERVKGIAFMEFIRPIPTWDEWPEFARETFQAFRTTDVGRKLIIDQNVFIEGTLPMGVVRPLTEVEMDHYREPFLNPVDREPLWRFPNELPIAGEPANIVALVEEYMDWLHQSPVPKLLFWGTPGVLIPPAEAARLAKSLPNCKAVDIGPGLNLLQEDNPDLIGSEIARWLSTLKISG

SEQ ID NO: 2817 - protein, 277 aa, Synthetic construct
MFHYVDVGPRDGTPVLFLHGNPTSSYVWRNIIPHVAPTHRCIAPDLIGMGKSDKPDLGYFFDDHVRFMDAFIEALGLEEVVLVIHDWGSALGFHWAKRNPERVKGIAFMEFIRPIPTWDEWPEFARETFQAFRTTDVGRKLIIDQNVFIEGTLPMGVVRPLTEVEMDHYREPFLNPVDREPLWRFPNELPIAGEPANIVALVEEYMDWLHQSPVPKLLFWGTPGVLIPPAEAARLAKSLPNCKAVDIGPGLNLLQEDNPDLIGSEIARWLSTLEASG

SEQ ID NO: 2818 - protein, 277 aa, Synthetic construct
MFHYVDVGPRDGTPVLFLHGNPTSSYVWRNIIPHVAPTHRCIAPDLIGMGKSDKPDLGYFFDDHVRFMDAFIEALGLEEVVLVIHDWGSALGFHWAKRNPERVKGIAFMEFIRPIPTWDEWPEFARETFQAFRTTDVGRKLIIDQNVFIEGTLPMGVVRPLTEVEMDHYREPFLNPVDREPLWRFPNELPIAGEPANIVALVEEYMDWLHQSPVPKLLFWGTPGVLIPPAEAARLAKSLPNCKAVDIGPGLNLLQEDNPDLIGSEIARWLSTLELSG

SEQ ID NO: 2819 - protein, 277 aa, Synthetic construct
MFHYVDVGPRDGTPVLFLHGNPTSSYVWRNIIPHVAPTHRCIAPDLIGMGKSDKPDLGYFFDDHVRFMDAFIEALGLEEVVLVIHDWGSALGFHWAKRNPERVKGIAFMEFIRPIPTWDEWPEFARETFQAFRTTDVGRKLIIDQNVFIEGTLPMGVVRPLTEVEMDHYREPFLNPVDREPLWRFPNELPIAGEPANIVALVEEYMDWLHQSPVPKLLFWGTPGVLIPPAEAARLAKSLPNCKAVDIGPGLNLLQEDNPDLIGSEIARWLSTLESSG

SEQ ID NO: 2820 - protein, 277 aa, Synthetic construct
MFHYVDVGPRDGTPVLFLHGNPTSSYVWRNIIPHVAPTHRCIAPDLIGMGKSDKPDLGYFFDDHVRFMDAFIEALGLEEVVLVIHDWGSALGFHWAKRNPERVKGIAFMEFIRPIPTWDEWPEFARETFQAFRTTDVGRKLIIDQNVFIEGTLPMGVVRPLTEVEMDHYREPFLNPVDREPLWRFPNELPIAGEPANIVALVEEYMDWLHQSPVPKLLFWGTPGVLIPPAEAARLAKSLPNCKAVDIGPGLNLLQEDNPDLIGSEIARWLSTLEPSG

SEQ ID NO: 2821 - protein, 277 aa, Synthetic construct
MFHYVDVGPRDGTPVLFLHGNPTSSYVWRNIIPHVAPTHRCIAPDLIGMGKSDKPDLGYFFDDHVRFMDAFIEALGLEEVVLVIHDWGSALGFHWAKRNPERVKGIAFMEFIRPIPTWDEWPEFARETFQAFRTTDVGRKLIIDQNVFIEGTLPMGVVRPLTEVEMDHYREPFLNPVDREPLWRFPNELPIAGEPANIVALVEEYMDWLHQSPVPKLLFWGTPGVLIPPAEAARLAKSLPNCKAVDIGPGLNLLQEDNPDLIGSEIARWLSTLEVSG

SEQ ID NO: 2822 - protein, 277 aa, Synthetic construct
MFHYVDVGPRDGTPVLFLHGNPTSSYVWRNIIPHVAPTHRCIAPDLIGMGKSDKPDLGYFFDDHVRFMDAFIEALGLEEVVLVIHDWGSALGFHWAKRNPERVKGIAFMEFIRPIPTWDEWPEFARETFQAFRTTDVGRKLIIDQNVFIEGTLPMGVVRPLTEVEMDHYREPFLNPVDREPLWRFPNELPIAGEPANIVALVEEYMDWLHQSPVPKLLFWGTPGVLIPPAEAARLAKSLPNCKAVDIGPGLNLLQEDNPDLIGSEIARWLSTLETSG

SEQ ID NO: 2823 - protein, 277 aa, Synthetic construct
MFHYVDVGPRDGTPVLFLHGNPTSSYVWRNIIPHVAPTHRCIAPDLIGMGKSDKPDLGYFFDDHVRFMDAFIEALGLEEVVLVIHDWGSALGFHWAKRNPERVKGIAFMEFIRPIPTWDEWPEFARETFQAFRTTDVGRKLIIDQNVFIEGTLPMGVVRPLTEVEMDHYREPFLNPVDREPLWRFPNELPIAGEPANIVALVEEYMDWLHQSPVPKLLFWGTPGVLIPPAEAARLAKSLPNCKAVDIGPGLNLLQEDNPDLIGSEIARWLSTLEIAG

SEQ ID NO: 2824 - protein, 277 aa, Synthetic construct
MFHYVDVGPRDGTPVLFLHGNPTSSYVWRNIIPHVAPTHRCIAPDLIGMGKSDKPDLGYFFDDHVRFMDAFIEALGLEEVVLVIHDWGSALGFHWAKRNPERVKGIAFMEFIRPIPTWDEWPEFARETFQAFRTTDVGRKLIIDQNVFIEGTLPMGVVRPLTEVEMDHYREPFLNPVDREPLWRFPNELPIAGEPANIVALVEEYMDWLHQSPVPKLLFWGTPGVLIPPAEAARLAKSLPNCKAVDIGPGLNLLQEDNPDLIGSEIARWLSTLEIGG

SEQ ID NO: 2825 - protein, 277 aa, Synthetic construct
MFHYVDVGPRDGTPVLFLHGNPTSSYVWRNIIPHVAPTHRCIAPDLIGMGKSDKPDLGYFFDDHVRFMDAFIEALGLEEVVLVIHDWGSALGFHWAKRNPERVKGIAFMEFIRPIPTWDEWPEFARETFQAFRTTDVGRKLIIDQNVFIEGTLPMGVVRPLTEVEMDHYREPFLNPVDREPLWRFPNELPIAGEPANIVALVEEYMDWLHQSPVPKLLFWGTPGVLIPPAEAARLAKSLPNCKAVDIGPGLNLLQEDNPDLIGSEIARWLSTLEIPG

SEQ ID NO: 2826 - protein, 277 aa, Synthetic construct
MFHYVDVGPRDGTPVLFLHGNPTSSYVWRNIIPHVAPTHRCIAPDLIGMGKSDKPDLGYFFDDHVRFMDAFIEALGLEEVVLVIHDWGSALGFHWAKRNPERVKGIAFMEFIRPIPTWDEWPEFARETFQAFRTTDVGRKLIIDQNVFIEGTLPMGVVRPLTEVEMDHYREPFLNPVDREPLWRFPNELPIAGEPANIVALVEEYMDWLHQSPVPKLLFWGTPGVLIPPAEAARLAKSLPNCKAVDIGPGLNLLQEDNPDLIGSEIARWLSTLEITG

SEQ ID NO: 2827 - protein, 277 aa, Synthetic construct
MFHYVDVGPRDGTPVLFLHGNPTSSYVWRNIIPHVAPTHRCIAPDLIGMGKSDKPDLGYFFDDHVRFMDAFIEALGLEEVVLVIHDWGSALGFHWAKRNPERVKGIAFMEFIRPIPTWDEWPEFARETFQAFRTTDVGRKLIIDQNVFIEGTLPMGVVRPLTEVEMDHYREPFLNPVDREPLWRFPNELPIAGEPANIVALVEEYMDWLHQSPVPKLLFWGTPGVLIPPAEAARLAKSLPNCKAVDIGPGLNLLQEDNPDLIGSEIARWLSTLEIRG

SEQ ID NO: 2828 - protein, 277 aa, Synthetic construct
MFHYVDVGPRDGTPVLFLHGNPTSSYVWRNIIPHVAPTHRCIAPDLIGMGKSDKPDLGYFFDDHVRFMDAFIEALGLEEVVLVIHDWGSALGFHWAKRNPERVKGIAFMEFIRPIPTWDEWPEFARETFQAFRTTDVGRKLIIDQNVFIEGTLPMGVVRPLTEVEMDHYREPFLNPVDREPLWRFPNELPIAGEPANIVALVEEYMDWLHQSPVPKLLFWGTPGVLIPPAEAARLAKSLPNCKAVDIGPGLNLLQEDNPDLIGSEIARWLSTLEIEG

SEQ ID NO: 2829 - protein, 277 aa, Synthetic construct
MFHYVDVGPRDGTPVLFLHGNPTSSYVWRNIIPHVAPTHRCIAPDLIGMGKSDKPDLGYFFDDHVRFMDAFIEALGLEEVVLVIHDWGSALGFHWAKRNPERVKGIAFMEFIRPIPTWDEWPEFARETFQAFRTTDVGRKLIIDQNVFIEGTLPMGVVRPLTEVEMDHYREPFLNPVDREPLWRFPNELPIAGEPANIVALVEEYMDWLHQSPVPKLLFWGTPGVLIPPAEAARLAKSLPNCKAVDIGPGLNLLQEDNPDLIGSEIARWLSTLEISA

SEQ ID NO: 2830 - protein, 277 aa, Synthetic construct
MFHYVDVGPRDGTPVLFLHGNPTSSYVWRNIIPHVAPTHRCIAPDLIGMGKSDKPDLGYFFDDHVRFMDAFIEALGLEEVVLVIHDWGSALGFHWAKRNPERVKGIAFMEFIRPIPTWDEWPEFARETFQAFRTTDVGRKLIIDQNVFIEGTLPMGVVRPLTEVEMDHYREPFLNPVDREPLWRFPNELPIAGEPANIVALVEEYMDWLHQSPVPKLLFWGTPGVLIPPAEAARLAKSLPNCKAVDIGPGLNLLQEDNPDLIGSEIARWLSTLEISS

SEQ ID NO: 2831 - protein, 277 aa, Synthetic construct
MFHYVDVGPRDGTPVLFLHGNPTSSYVWRNIIPHVAPTHRCIAPDLIGMGKSDKPDLGYFFDDHVRFMDAFIEALGLEEVVLVIHDWGSALGFHWAKRNPERVKGIAFMEFIRPIPTWDEWPEFARETFQAFRTTDVGRKLIIDQNVFIEGTLPMGVVRPLTEVEMDHYREPFLNPVDREPLWRFPNELPIAGEPANIVALVEEYMDWLHQSPVPKLLFWGTPGVLIPPAEAARLAKSLPNCKAVDIGPGLNLLQEDNPDLIGSEIARWLSTLEISR

SEQ ID NO: 2832 - protein, 277 aa, Synthetic construct
MFHYVDVGPRDGTPVLFLHGNPTSSYVWRNIIPHVAPTHRCIAPDLIGMGKSDKPDLGYFFDDHVRFMDAFIEALGLEEVVLVIHDWGSALGFHWAKRNPERVKGIAFMEFIRPIPTWDEWPEFARETFQAFRTTDVGRKLIIDQNVFIEGTLPMGVVRPLTEVEMDHYREPFLNPVDREPLWRFPNELPIAGEPANIVALVEEYMDWLHQSPVPKLLFWGTPGVLIPPAEAARLAKSLPNCKAVDIGPGLNLLQEDNPDLIGSEIARWLSTLEIST

SEQ ID NO: 2833 - protein, 277 aa, Synthetic construct
MFHYVDVGPRDGTPVLFLHGNPTSSYVWRNIIPHVAPTHRCIAPDLIGMGKSDKPDLGYFFDDHVRFMDAFIEALGLEEVVLVIHDWGSALGFHWAKRNPERVKGIAFMEFIRPIPTWDEWPEFARETFQAFRTTDVGRKLIIDQNVFIEGTLPMGVVRPLTEVEMDHYREPFLNPVDREPLWRFPNELPIAGEPANIVALVEEYMDWLHQSPVPKLLFWGTPGVLIPPAEAARLAKSLPNCKAVDIGPGLNLLQEDNPDLIGSEIARWLSTLEISP

SEQ ID NO: 2834 - protein, 277 aa, Synthetic construct
MFHYVDVGPRDGTPVLFLHGNPTSSYVWRNIIPHVAPTHRCIAPDLIGMGKSDKPDLGYFFDDHVRFMDAFIEALGLEEVVLVIHDWGSALGFHWAKRNPERVKGIAFMEFIRPIPTWDEWPEFARETFQAFRTTDVGRKLIIDQNVFIEGTLPMGVVRPLTEVEMDHYREPFLNPVDREPLWRFPNELPIAGEPANIVALVEEYMDWLHQSPVPKLLFWGTPGVLIPPAEAARLAKSLPNCKAVDIGPGLNLLQEDNPDLIGSEIARWLSTLEISK

SEQ ID NO: 2835 - protein, 277 aa, Synthetic construct
MFHYVDEGPRDGTPVLFLHGNPTSSYVWRNIIPHVAPTHRCIAPDLIGMGKSDKPDLGYFFDDHVRFMDAFIEALGLEEVVLVIHDWGSALGFHWAKRNPERVKGIAFMEFIRPIPTWDEWPEFARETFQAFRTTDVGRKLIIDQNVFIEGTLPMGVVRPLTEVEMDHYREPFLNPADREPLWRFPNELPIAGEPANIVALVEEYMDWLHQSPVPKLLFWGTPGVLIPPAEAARLAKSLPNCKAVDIGPGLNLLQEDNPDLIGSEIARWLSTLEISG

SEQ ID NO: 2836 - protein, 277 aa, Synthetic construct
MFHYVDEGPRDGTPVLFLHGNPTSSYVWRNIIPHVAPTHRCIAPDLIGMGKSDKPDLGYFFDDHVRFMDAFIEALGLEEVVLVIHDWGSALGFHWAKRNPERVKGIAFMEFIRPIPTWDEWPEFARETFQAFRTTDVGRKLIIDQNVFIEGTLPMGVVRPLTEVEMDHYREPFLNPVDREPLWRFPNELPIAGEPANVVALVEEYMDWLHQSPVPKLLFWGTPGVLIPPAEAARLAKSLPNCKAVDIGPGLNLLQEDNPDLIGSEIARWLSTLEISG

SEQ ID NO: 2837 - protein, 277 aa, Synthetic construct
MFHYVDEGPRDGTPVLFLHGNPTSSYVWRNIIPHVAPTHRCIAPDLIGMGKSDKPDLGYFFDDHVRFMDAFIEALGLEEVVLVIHDWGSALGFHWAKRNPERVKGIAFMEFIRPIPTWDEWPEFARETFQAFRTTDVGRKLIIDQNVFIEGTLPMGVVRPLTEVEMDHYREPFLNPVDREPLWRFPNELPIAGEPANIVAIVEEYMDWLHQSPVPKLLFWGTPGVLIPPAEAARLAKSLPNCKAVDIGPGLNLLQEDNPDLIGSEIARWLSTLEISG

SEQ ID NO: 2838 - protein, 277 aa, Synthetic construct
MFHYVDEGPRDGTPVLFLHGNPTSSYVWRNIIPHVAPTHRCIAPDLIGMGKSDKPDLGYFFDDHVRFMDAFIEALGLEEVVLVIHDWGSALGFHWAKRNPERVKGIAFMEFIRPIPTWDEWPEFARETFQAFRTTDVGRKLIIDQNVFIEGTLPMGVVRPLTEVEMDHYREPFLNPVDREPLWRFPNELPIAGEPANIVALVDEYMDWLHQSPVPKLLFWGTPGVLIPPAEAARLAKSLPNCKAVDIGPGLNLLQEDNPDLIGSEIARWLSTLEISG

SEQ ID NO: 2839 - protein, 277 aa, Synthetic construct
MFHYVDEGPRDGTPVLFLHGNPTSSYVWRNIIPHVAPTHRCIAPDLIGMGKSDKPDLGYFFDDHVRFMDAFIEALGLEEVVLVIHDWGSALGFHWAKRNPERVKGIAFMEFIRPIPTWDEWPEFARETFQAFRTTDVGRKLIIDQNVFIEGTLPMGVVRPLTEVEMDHYREPFLNPVDREPLWRFPNELPIAGEPANIVALVEEYMDWLHTSPVPKLLFWGTPGVLIPPAEAARLAKSLPNCKAVDIGPGLNLLQEDNPDLIGSEIARWLSTLEISG

SEQ ID NO: 2840 - protein, 277 aa, Synthetic construct
MFHYVDEGPRDGTPVLFLHGNPTSSYVWRNIIPHVAPTHRCIAPDLIGMGKSDKPDLGYFFDDHVRFMDAFIEALGLEEVVLVIHDWGSALGFHWAKRNPERVKGIAFMEFIRPIPTWDEWPEFARETFQAFRTTDVGRKLIIDQNVFIEGTLPMGVVRPLTEVEMDHYREPFLNPVDREPLWRFPNELPIAGEPANIVALVEEYMDWLHQSPVPKLLFWGTPGVLIPPAEAARLAESLPNCKAVDIGPGLNLLQEDNPDLIGSEIARWLSTLEISG

SEQ ID NO: 2841 - protein, 277 aa, Synthetic construct
MFHYVDEGPRDGTPVLFLHGNPTSSYVWRNIIPHVAPTHRCIAPDLIGMGKSDKPDLGYFFDDHVRFMDAFIEALGLEEVVLVIHDWGSALGFHWAKRNPERVKGIAFMEFIRPIPTWDEWPEFARETFQAFRTTDVGRKLIIDQNVFIEGTLPMGVVRPLTEVEMDHYREPFLNPVDREPLWRFPNELPIAGEPANIVALVEEYMDWLHQSPVPKLLFWGTPGVLIPPAEAARLAKTLPNCKAVDIGPGLNLLQEDNPDLIGSEIARWLSTLEISG

SEQ ID NO: 2842 - protein, 277 aa, Synthetic construct
MFHYVDEGPRDGTPVLFLHGNPTSSYVWRNIIPHVAPTHRCIAPDLIGMGKSDKPDLGYFFDDHVRFMDAFIEALGLEEVVLVIHDWGSALGFHWAKRNPERVKGIAFMEFIRPIPTWDEWPEFARETFQAFRTTDVGRKLIIDQNVFIEGTLPMGVVRPLTEVEMDHYREPFLNPVDREPLWRFPNELPIAGEPANIVALVEEYMDWLHQSPVPKLLFWGTPGVLIPPAEAARLAKSLPNCKAVDVGPGLNLLQEDNPDLIGSEIARWLSTLEISG

SEQ ID NO: 2843 - protein, 277 aa, Synthetic construct
MFHYVDEGPRDGTPVLFLHGNPTSSYVWRNIIPHVAPTHRCIAPDLIGMGKSDKPDLGYFFDDHVRFMDAFIEALGLEEVVLVIHDWGSALGFHWAKRNPERVKGIAFMEFIRPIPTWDEWPEFARETFQAFRTTDVGRKLIIDQNVFIEGTLPMGVVRPLTEVEMDHYREPFLNPVDREPLWRFPNELPIAGEPANIVALVEEYMDWLHQSPVPKLLFWGTPGVLIPPAEAARLAKSLPNCKAVDIGPGLNLLQEDNPDLIGAEIARWLSTLEISG

SEQ ID NO: 2844 - protein, 277 aa, Synthetic construct
MFHYVDVGPRDGTPVLFLHGNPTSSYVWRNIIPHVSPTHRCIAPDLIGMGKSDKPDLGYFFDDHVRFMDAFIEALGLEEVVLVIHDWGSALGFHWAKRNPERVKGIAFMEFIRPIPTWDEWPEFARETFQAFRTTDVGRKLIIDQNVFIEGTLPMGVVRPLTEVEMDHYREPFLNPADREPLWRFPNELPIAGEPANIVALVEEYMDWLHQSPVPKLLFWGTPGVLIPPAEAARLAKSLPNCKAVDIGPGLNLLQEDNPDLIGSEIARWLSTLEISG

SEQ ID NO: 2845 - protein, 277 aa, Synthetic construct
MFHYVDVGPRDGTPVLFLHGNPTSSYVWRNIIPHVSPTHRCIAPDLIGMGKSDKPDLGYFFDDHVRFMDAFIEALGLEEVVLVIHDWGSALGFHWAKRNPERVKGIAFMEFIRPIPTWDEWPEFARETFQAFRTTDVGRKLIIDQNVFIEGTLPMGVVRPLTEVEMDHYREPFLNPVDREPLWRFPNELPIAGEPANVVALVEEYMDWLHQSPVPKLLFWGTPGVLIPPAEAARLAKSLPNCKAVDIGPGLNLLQEDNPDLIGSEIARWLSTLEISG

SEQ ID NO: 2846 - protein, 277 aa, Synthetic construct
MFHYVDVGPRDGTPVLFLHGNPTSSYVWRNIIPHVSPTHRCIAPDLIGMGKSDKPDLGYFFDDHVRFMDAFIEALGLEEVVLVIHDWGSALGFHWAKRNPERVKGIAFMEFIRPIPTWDEWPEFARETFQAFRTTDVGRKLIIDQNVFIEGTLPMGVVRPLTEVEMDHYREPFLNPVDREPLWRFPNELPIAGEPANIVAIVEEYMDWLHQSPVPKLLFWGTPGVLIPPAEAARLAKSLPNCKAVDIGPGLNLLQEDNPDLIGSEIARWLSTLEISG

SEQ ID NO: 2847 - protein, 277 aa, Synthetic construct
MFHYVDVGPRDGTPVLFLHGNPTSSYVWRNIIPHVSPTHRCIAPDLIGMGKSDKPDLGYFFDDHVRFMDAFIEALGLEEVVLVIHDWGSALGFHWAKRNPERVKGIAFMEFIRPIPTWDEWPEFARETFQAFRTTDVGRKLIIDQNVFIEGTLPMGVVRPLTEVEMDHYREPFLNPVDREPLWRFPNELPIAGEPANIVALVDEYMDWLHQSPVPKLLFWGTPGVLIPPAEAARLAKSLPNCKAVDIGPGLNLLQEDNPDLIGSEIARWLSTLEISG

SEQ ID NO: 2848 - protein, 277 aa, Synthetic construct
MFHYVDVGPRDGTPVLFLHGNPTSSYVWRNIIPHVSPTHRCIAPDLIGMGKSDKPDLGYFFDDHVRFMDAFIEALGLEEVVLVIHDWGSALGFHWAKRNPERVKGIAFMEFIRPIPTWDEWPEFARETFQAFRTTDVGRKLIIDQNVFIEGTLPMGVVRPLTEVEMDHYREPFLNPVDREPLWRFPNELPIAGEPANIVALVEEYMDWLHTSPVPKLLFWGTPGVLIPPAEAARLAKSLPNCKAVDIGPGLNLLQEDNPDLIGSEIARWLSTLEISG

SEQ ID NO: 2849 - protein, 277 aa, Synthetic construct
MFHYVDVGPRDGTPVLFLHGNPTSSYVWRNIIPHVSPTHRCIAPDLIGMGKSDKPDLGYFFDDHVRFMDAFIEALGLEEVVLVIHDWGSALGFHWAKRNPERVKGIAFMEFIRPIPTWDEWPEFARETFQAFRTTDVGRKLIIDQNVFIEGTLPMGVVRPLTEVEMDHYREPFLNPVDREPLWRFPNELPIAGEPANIVALVEEYMDWLHQSPVPKLLFWGTPGVLIPPAEAARLAESLPNCKAVDIGPGLNLLQEDNPDLIGSEIARWLSTLEISG

SEQ ID NO: 2850 - protein, 277 aa, Synthetic construct
MFHYVDVGPRDGTPVLFLHGNPTSSYVWRNIIPHVSPTHRCIAPDLIGMGKSDKPDLGYFFDDHVRFMDAFIEALGLEEVVLVIHDWGSALGFHWAKRNPERVKGIAFMEFIRPIPTWDEWPEFARETFQAFRTTDVGRKLIIDQNVFIEGTLPMGVVRPLTEVEMDHYREPFLNPVDREPLWRFPNELPIAGEPANIVALVEEYMDWLHQSPVPKLLFWGTPGVLIPPAEAARLAKTLPNCKAVDIGPGLNLLQEDNPDLIGSEIARWLSTLEISG

SEQ ID NO: 2851 - protein, 277 aa, Synthetic construct
MFHYVDVGPRDGTPVLFLHGNPTSSYVWRNIIPHVSPTHRCIAPDLIGMGKSDKPDLGYFFDDHVRFMDAFIEALGLEEVVLVIHDWGSALGFHWAKRNPERVKGIAFMEFIRPIPTWDEWPEFARETFQAFRTTDVGRKLIIDQNVFIEGTLPMGVVRPLTEVEMDHYREPFLNPVDREPLWRFPNELPIAGEPANIVALVEEYMDWLHQSPVPKLLFWGTPGVLIPPAEAARLAKSLPNCKAVDVGPGLNLLQEDNPDLIGSEIARWLSTLEISG

SEQ ID NO: 2852 - protein, 277 aa, Synthetic construct
MFHYVDVGPRDGTPVLFLHGNPTSSYVWRNIIPHVSPTHRCIAPDLIGMGKSDKPDLGYFFDDHVRFMDAFIEALGLEEVVLVIHDWGSALGFHWAKRNPERVKGIAFMEFIRPIPTWDEWPEFARETFQAFRTTDVGRKLIIDQNVFIEGTLPMGVVRPLTEVEMDHYREPFLNPVDREPLWRFPNELPIAGEPANIVALVEEYMDWLHQSPVPKLLFWGTPGVLIPPAEAARLAKSLPNCKAVDIGPGLNLLQEDNPDLIGAEIARWLSTLEISG

SEQ ID NO: 2853 - protein, 277 aa, Synthetic construct
MFHYVDVGPRDGTPVLFLHGNPTSSYVWRNIIPHVAPTHRCIAPDLIGFGKSDKPDLGYFFDDHVRFMDAFIEALGLEEVVLVIHDWGSALGFHWAKRNPERVKGIAFMEFIRPIPTWDEWPEFARETFQAFRTTDVGRKLIIDQNVFIEGTLPMGVVRPLTEVEMDHYREPFLNPADREPLWRFPNELPIAGEPANIVALVEEYMDWLHQSPVPKLLFWGTPGVLIPPAEAARLAKSLPNCKAVDIGPGLNLLQEDNPDLIGSEIARWLSTLEISG

SEQ ID NO: 2854 - protein, 277 aa, Synthetic construct
MFHYVDVGPRDGTPVLFLHGNPTSSYVWRNIIPHVAPTHRCIAPDLIGFGKSDKPDLGYFFDDHVRFMDAFIEALGLEEVVLVIHDWGSALGFHWAKRNPERVKGIAFMEFIRPIPTWDEWPEFARETFQAFRTTDVGRKLIIDQNVFIEGTLPMGVVRPLTEVEMDHYREPFLNPVDREPLWRFPNELPIAGEPANVVALVEEYMDWLHQSPVPKLLFWGTPGVLIPPAEAARLAKSLPNCKAVDIGPGLNLLQEDNPDLIGSEIARWLSTLEISG

SEQ ID NO: 2855 - protein, 277 aa, Synthetic construct
MFHYVDVGPRDGTPVLFLHGNPTSSYVWRNIIPHVAPTHRCIAPDLIGFGKSDKPDLGYFFDDHVRFMDAFIEALGLEEVVLVIHDWGSALGFHWAKRNPERVKGIAFMEFIRPIPTWDEWPEFARETFQAFRTTDVGRKLIIDQNVFIEGTLPMGVVRPLTEVEMDHYREPFLNPVDREPLWRFPNELPIAGEPANIVAIVEEYMDWLHQSPVPKLLFWGTPGVLIPPAEAARLAKSLPNCKAVDIGPGLNLLQEDNPDLIGSEIARWLSTLEISG

SEQ ID NO: 2856 - protein, 277 aa, Synthetic construct
MFHYVDVGPRDGTPVLFLHGNPTSSYVWRNIIPHVAPTHRCIAPDLIGFGKSDKPDLGYFFDDHVRFMDAFIEALGLEEVVLVIHDWGSALGFHWAKRNPERVKGIAFMEFIRPIPTWDEWPEFARETFQAFRTTDVGRKLIIDQNVFIEGTLPMGVVRPLTEVEMDHYREPFLNPVDREPLWRFPNELPIAGEPANIVALVDEYMDWLHQSPVPKLLFWGTPGVLIPPAEAARLAKSLPNCKAVDIGPGLNLLQEDNPDLIGSEIARWLSTLEISG

SEQ ID NO: 2857 - protein, 277 aa, Synthetic construct
MFHYVDVGPRDGTPVLFLHGNPTSSYVWRNIIPHVAPTHRCIAPDLIGFGKSDKPDLGYFFDDHVRFMDAFIEALGLEEVVLVIHDWGSALGFHWAKRNPERVKGIAFMEFIRPIPTWDEWPEFARETFQAFRTTDVGRKLIIDQNVFIEGTLPMGVVRPLTEVEMDHYREPFLNPVDREPLWRFPNELPIAGEPANIVALVEEYMDWLHTSPVPKLLFWGTPGVLIPPAEAARLAKSLPNCKAVDIGPGLNLLQEDNPDLIGSEIARWLSTLEISG

SEQ ID NO: 2858 - protein, 277 aa, Synthetic construct
MFHYVDVGPRDGTPVLFLHGNPTSSYVWRNIIPHVAPTHRCIAPDLIGFGKSDKPDLGYFFDDHVRFMDAFIEALGLEEVVLVIHDWGSALGFHWAKRNPERVKGIAFMEFIRPIPTWDEWPEFARETFQAFRTTDVGRKLIIDQNVFIEGTLPMGVVRPLTEVEMDHYREPFLNPVDREPLWRFPNELPIAGEPANIVALVEEYMDWLHQSPVPKLLFWGTPGVLIPPAEAARLAESLPNCKAVDIGPGLNLLQEDNPDLIGSEIARWLSTLEISG

SEQ ID NO: 2859 - protein, 277 aa, Synthetic construct
MFHYVDVGPRDGTPVLFLHGNPTSSYVWRNIIPHVAPTHRCIAPDLIGFGKSDKPDLGYFFDDHVRFMDAFIEALGLEEVVLVIHDWGSALGFHWAKRNPERVKGIAFMEFIRPIPTWDEWPEFARETFQAFRTTDVGRKLIIDQNVFIEGTLPMGVVRPLTEVEMDHYREPFLNPVDREPLWRFPNELPIAGEPANIVALVEEYMDWLHQSPVPKLLFWGTPGVLIPPAEAARLAKTLPNCKAVDIGPGLNLLQEDNPDLIGSEIARWLSTLEISG

SEQ ID NO: 2860 - protein, 277 aa, Synthetic construct
MFHYVDVGPRDGTPVLFLHGNPTSSYVWRNIIPHVAPTHRCIAPDLIGFGKSDKPDLGYFFDDHVRFMDAFIEALGLEEVVLVIHDWGSALGFHWAKRNPERVKGIAFMEFIRPIPTWDEWPEFARETFQAFRTTDVGRKLIIDQNVFIEGTLPMGVVRPLTEVEMDHYREPFLNPVDREPLWRFPNELPIAGEPANIVALVEEYMDWLHQSPVPKLLFWGTPGVLIPPAEAARLAKSLPNCKAVDVGPGLNLLQEDNPDLIGSEIARWLSTLEISG

SEQ ID NO: 2861 - protein, 277 aa, Synthetic construct
MFHYVDVGPRDGTPVLFLHGNPTSSYVWRNIIPHVAPTHRCIAPDLIGFGKSDKPDLGYFFDDHVRFMDAFIEALGLEEVVLVIHDWGSALGFHWAKRNPERVKGIAFMEFIRPIPTWDEWPEFARETFQAFRTTDVGRKLIIDQNVFIEGTLPMGVVRPLTEVEMDHYREPFLNPVDREPLWRFPNELPIAGEPANIVALVEEYMDWLHQSPVPKLLFWGTPGVLIPPAEAARLAKSLPNCKAVDIGPGLNLLQEDNPDLIGAEIARWLSTLEISG

SEQ ID NO: 2862 - protein, 277 aa, Synthetic construct
MFHYVDVGPRDGTPVLFLHGNPTSSYVWRNIIPHVAPTHRCIAPDLIGMGKSGKPDLGYFFDDHVRFMDAFIEALGLEEVVLVIHDWGSALGFHWAKRNPERVKGIAFMEFIRPIPTWDEWPEFARETFQAFRTTDVGRKLIIDQNVFIEGTLPMGVVRPLTEVEMDHYREPFLNPADREPLWRFPNELPIAGEPANIVALVEEYMDWLHQSPVPKLLFWGTPGVLIPPAEAARLAKSLPNCKAVDIGPGLNLLQEDNPDLIGSEIARWLSTLEISG

SEQ ID NO: 2863 - protein, 277 aa, Synthetic construct
MFHYVDVGPRDGTPVLFLHGNPTSSYVWRNIIPHVAPTHRCIAPDLIGMGKSGKPDLGYFFDDHVRFMDAFIEALGLEEVVLVIHDWGSALGFHWAKRNPERVKGIAFMEFIRPIPTWDEWPEFARETFQAFRTTDVGRKLIIDQNVFIEGTLPMGVVRPLTEVEMDHYREPFLNPVDREPLWRFPNELPIAGEPANVVALVEEYMDWLHQSPVPKLLFWGTPGVLIPPAEAARLAKSLPNCKAVDIGPGLNLLQEDNPDLIGSEIARWLSTLEISG

SEQ ID NO: 2864 - protein, 277 aa, Synthetic construct
MFHYVDVGPRDGTPVLFLHGNPTSSYVWRNIIPHVAPTHRCIAPDLIGMGKSGKPDLGYFFDDHVRFMDAFIEALGLEEVVLVIHDWGSALGFHWAKRNPERVKGIAFMEFIRPIPTWDEWPEFARETFQAFRTTDVGRKLIIDQNVFIEGTLPMGVVRPLTEVEMDHYREPFLNPVDREPLWRFPNELPIAGEPANIVAIVEEYMDWLHQSPVPKLLFWGTPGVLIPPAEAARLAKSLPNCKAVDIGPGLNLLQEDNPDLIGSEIARWLSTLEISG

SEQ ID NO: 2865 - protein, 277 aa, Synthetic construct
MFHYVDVGPRDGTPVLFLHGNPTSSYVWRNIIPHVAPTHRCIAPDLIGMGKSGKPDLGYFFDDHVRFMDAFIEALGLEEVVLVIHDWGSALGFHWAKRNPERVKGIAFMEFIRPIPTWDEWPEFARETFQAFRTTDVGRKLIIDQNVFIEGTLPMGVVRPLTEVEMDHYREPFLNPVDREPLWRFPNELPIAGEPANIVALVDEYMDWLHQSPVPKLLFWGTPGVLIPPAEAARLAKSLPNCKAVDIGPGLNLLQEDNPDLIGSEIARWLSTLEISG

SEQ ID NO: 2866 - protein, 277 aa, Synthetic construct
MFHYVDVGPRDGTPVLFLHGNPTSSYVWRNIIPHVAPTHRCIAPDLIGMGKSGKPDLGYFFDDHVRFMDAFIEALGLEEVVLVIHDWGSALGFHWAKRNPERVKGIAFMEFIRPIPTWDEWPEFARETFQAFRTTDVGRKLIIDQNVFIEGTLPMGVVRPLTEVEMDHYREPFLNPVDREPLWRFPNELPIAGEPANIVALVEEYMDWLHTSPVPKLLFWGTPGVLIPPAEAARLAKSLPNCKAVDIGPGLNLLQEDNPDLIGSEIARWLSTLEISG

SEQ ID NO: 2867 - protein, 277 aa, Synthetic construct
MFHYVDVGPRDGTPVLFLHGNPTSSYVWRNIIPHVAPTHRCIAPDLIGMGKSGKPDLGYFFDDHVRFMDAFIEALGLEEVVLVIHDWGSALGFHWAKRNPERVKGIAFMEFIRPIPTWDEWPEFARETFQAFRTTDVGRKLIIDQNVFIEGTLPMGVVRPLTEVEMDHYREPFLNPVDREPLWRFPNELPIAGEPANIVALVEEYMDWLHQSPVPKLLFWGTPGVLIPPAEAARLAESLPNCKAVDIGPGLNLLQEDNPDLIGSEIARWLSTLEISG

SEQ ID NO: 2868 - protein, 277 aa, Synthetic construct
MFHYVDVGPRDGTPVLFLHGNPTSSYVWRNIIPHVAPTHRCIAPDLIGMGKSGKPDLGYFFDDHVRFMDAFIEALGLEEVVLVIHDWGSALGFHWAKRNPERVKGIAFMEFIRPIPTWDEWPEFARETFQAFRTTDVGRKLIIDQNVFIEGTLPMGVVRPLTEVEMDHYREPFLNPVDREPLWRFPNELPIAGEPANIVALVEEYMDWLHQSPVPKLLFWGTPGVLIPPAEAARLAKTLPNCKAVDIGPGLNLLQEDNPDLIGSEIARWLSTLEISG

SEQ ID NO: 2869 - protein, 277 aa, Synthetic construct
MFHYVDVGPRDGTPVLFLHGNPTSSYVWRNIIPHVAPTHRCIAPDLIGMGKSGKPDLGYFFDDHVRFMDAFIEALGLEEVVLVIHDWGSALGFHWAKRNPERVKGIAFMEFIRPIPTWDEWPEFARETFQAFRTTDVGRKLIIDQNVFIEGTLPMGVVRPLTEVEMDHYREPFLNPVDREPLWRFPNELPIAGEPANIVALVEEYMDWLHQSPVPKLLFWGTPGVLIPPAEAARLAKSLPNCKAVDVGPGLNLLQEDNPDLIGSEIARWLSTLEISG

SEQ ID NO: 2870 - protein, 277 aa, Synthetic construct
MFHYVDVGPRDGTPVLFLHGNPTSSYVWRNIIPHVAPTHRCIAPDLIGMGKSGKPDLGYFFDDHVRFMDAFIEALGLEEVVLVIHDWGSALGFHWAKRNPERVKGIAFMEFIRPIPTWDEWPEFARETFQAFRTTDVGRKLIIDQNVFIEGTLPMGVVRPLTEVEMDHYREPFLNPVDREPLWRFPNELPIAGEPANIVALVEEYMDWLHQSPVPKLLFWGTPGVLIPPAEAARLAKSLPNCKAVDIGPGLNLLQEDNPDLIGAEIARWLSTLEISG

SEQ ID NO: 2871 - protein, 277 aa, Synthetic construct
MFHYVDVGPRDGTPVLFLHGNPTSSYVWRNIIPHVAPTHRCIAPDLIGMGKSDKPDIGYFFDDHVRFMDAFIEALGLEEVVLVIHDWGSALGFHWAKRNPERVKGIAFMEFIRPIPTWDEWPEFARETFQAFRTTDVGRKLIIDQNVFIEGTLPMGVVRPLTEVEMDHYREPFLNPADREPLWRFPNELPIAGEPANIVALVEEYMDWLHQSPVPKLLFWGTPGVLIPPAEAARLAKSLPNCKAVDIGPGLNLLQEDNPDLIGSEIARWLSTLEISG

SEQ ID NO: 2872 - protein, 277 aa, Synthetic construct
MFHYVDVGPRDGTPVLFLHGNPTSSYVWRNIIPHVAPTHRCIAPDLIGMGKSDKPDIGYFFDDHVRFMDAFIEALGLEEVVLVIHDWGSALGFHWAKRNPERVKGIAFMEFIRPIPTWDEWPEFARETFQAFRTTDVGRKLIIDQNVFIEGTLPMGVVRPLTEVEMDHYREPFLNPVDREPLWRFPNELPIAGEPANVVALVEEYMDWLHQSPVPKLLFWGTPGVLIPPAEAARLAKSLPNCKAVDIGPGLNLLQEDNPDLIGSEIARWLSTLEISG

SEQ ID NO: 2873 - protein, 277 aa, Synthetic construct
MFHYVDVGPRDGTPVLFLHGNPTSSYVWRNIIPHVAPTHRCIAPDLIGMGKSDKPDIGYFFDDHVRFMDAFIEALGLEEVVLVIHDWGSALGFHWAKRNPERVKGIAFMEFIRPIPTWDEWPEFARETFQAFRTTDVGRKLIIDQNVFIEGTLPMGVVRPLTEVEMDHYREPFLNPVDREPLWRFPNELPIAGEPANIVAIVEEYMDWLHQSPVPKLLFWGTPGVLIPPAEAARLAKSLPNCKAVDIGPGLNLLQEDNPDLIGSEIARWLSTLEISG

SEQ ID NO: 2874 - protein, 277 aa, Synthetic construct
MFHYVDVGPRDGTPVLFLHGNPTSSYVWRNIIPHVAPTHRCIAPDLIGMGKSDKPDIGYFFDDHVRFMDAFIEALGLEEVVLVIHDWGSALGFHWAKRNPERVKGIAFMEFIRPIPTWDEWPEFARETFQAFRTTDVGRKLIIDQNVFIEGTLPMGVVRPLTEVEMDHYREPFLNPVDREPLWRFPNELPIAGEPANIVALVDEYMDWLHQSPVPKLLFWGTPGVLIPPAEAARLAKSLPNCKAVDIGPGLNLLQEDNPDLIGSEIARWLSTLEISG

SEQ ID NO: 2875 - protein, 277 aa, Synthetic construct
MFHYVDVGPRDGTPVLFLHGNPTSSYVWRNIIPHVAPTHRCIAPDLIGMGKSDKPDIGYFFDDHVRFMDAFIEALGLEEVVLVIHDWGSALGFHWAKRNPERVKGIAFMEFIRPIPTWDEWPEFARETFQAFRTTDVGRKLIIDQNVFIEGTLPMGVVRPLTEVEMDHYREPFLNPVDREPLWRFPNELPIAGEPANIVALVEEYMDWLHTSPVPKLLFWGTPGVLIPPAEAARLAKSLPNCKAVDIGPGLNLLQEDNPDLIGSEIARWLSTLEISG

SEQ ID NO: 2876 - protein, 277 aa, Synthetic construct
MFHYVDVGPRDGTPVLFLHGNPTSSYVWRNIIPHVAPTHRCIAPDLIGMGKSDKPDIGYFFDDHVRFMDAFIEALGLEEVVLVIHDWGSALGFHWAKRNPERVKGIAFMEFIRPIPTWDEWPEFARETFQAFRTTDVGRKLIIDQNVFIEGTLPMGVVRPLTEVEMDHYREPFLNPVDREPLWRFPNELPIAGEPANIVALVEEYMDWLHQSPVPKLLFWGTPGVLIPPAEAARLAESLPNCKAVDIGPGLNLLQEDNPDLIGSEIARWLSTLEISG

SEQ ID NO: 2877 - protein, 277 aa, Synthetic construct
MFHYVDVGPRDGTPVLFLHGNPTSSYVWRNIIPHVAPTHRCIAPDLIGMGKSDKPDIGYFFDDHVRFMDAFIEALGLEEVVLVIHDWGSALGFHWAKRNPERVKGIAFMEFIRPIPTWDEWPEFARETFQAFRTTDVGRKLIIDQNVFIEGTLPMGVVRPLTEVEMDHYREPFLNPVDREPLWRFPNELPIAGEPANIVALVEEYMDWLHQSPVPKLLFWGTPGVLIPPAEAARLAKTLPNCKAVDIGPGLNLLQEDNPDLIGSEIARWLSTLEISG

SEQ ID NO: 2878 - protein, 277 aa, Synthetic construct
MFHYVDVGPRDGTPVLFLHGNPTSSYVWRNIIPHVAPTHRCIAPDLIGMGKSDKPDIGYFFDDHVRFMDAFIEALGLEEVVLVIHDWGSALGFHWAKRNPERVKGIAFMEFIRPIPTWDEWPEFARETFQAFRTTDVGRKLIIDQNVFIEGTLPMGVVRPLTEVEMDHYREPFLNPVDREPLWRFPNELPIAGEPANIVALVEEYMDWLHQSPVPKLLFWGTPGVLIPPAEAARLAKSLPNCKAVDVGPGLNLLQEDNPDLIGSEIARWLSTLEISG

SEQ ID NO: 2879 - protein, 277 aa, Synthetic construct
MFHYVDVGPRDGTPVLFLHGNPTSSYVWRNIIPHVAPTHRCIAPDLIGMGKSDKPDIGYFFDDHVRFMDAFIEALGLEEVVLVIHDWGSALGFHWAKRNPERVKGIAFMEFIRPIPTWDEWPEFARETFQAFRTTDVGRKLIIDQNVFIEGTLPMGVVRPLTEVEMDHYREPFLNPVDREPLWRFPNELPIAGEPANIVALVEEYMDWLHQSPVPKLLFWGTPGVLIPPAEAARLAKSLPNCKAVDIGPGLNLLQEDNPDLIGAEIARWLSTLEISG

SEQ ID NO: 2880 - protein, 277 aa, Synthetic construct
MFHYVDVGPRDGTPVLFLHGNPTSSYVWRNIIPHVAPTHRCIAPDLIGMGKSDKPDLGYFFDDHVRFMDAFIEALGLEEVVLVVHDWGSALGFHWAKRNPERVKGIAFMEFIRPIPTWDEWPEFARETFQAFRTTDVGRKLIIDQNVFIEGTLPMGVVRPLTEVEMDHYREPFLNPADREPLWRFPNELPIAGEPANIVALVEEYMDWLHQSPVPKLLFWGTPGVLIPPAEAARLAKSLPNCKAVDIGPGLNLLQEDNPDLIGSEIARWLSTLEISG

SEQ ID NO: 2881 - protein, 277 aa, Synthetic construct
MFHYVDVGPRDGTPVLFLHGNPTSSYVWRNIIPHVAPTHRCIAPDLIGMGKSDKPDLGYFFDDHVRFMDAFIEALGLEEVVLVVHDWGSALGFHWAKRNPERVKGIAFMEFIRPIPTWDEWPEFARETFQAFRTTDVGRKLIIDQNVFIEGTLPMGVVRPLTEVEMDHYREPFLNPVDREPLWRFPNELPIAGEPANVVALVEEYMDWLHQSPVPKLLFWGTPGVLIPPAEAARLAKSLPNCKAVDIGPGLNLLQEDNPDLIGSEIARWLSTLEISG

SEQ ID NO: 2882 - protein, 277 aa, Synthetic construct
MFHYVDVGPRDGTPVLFLHGNPTSSYVWRNIIPHVAPTHRCIAPDLIGMGKSDKPDLGYFFDDHVRFMDAFIEALGLEEVVLVVHDWGSALGFHWAKRNPERVKGIAFMEFIRPIPTWDEWPEFARETFQAFRTTDVGRKLIIDQNVFIEGTLPMGVVRPLTEVEMDHYREPFLNPVDREPLWRFPNELPIAGEPANIVAIVEEYMDWLHQSPVPKLLFWGTPGVLIPPAEAARLAKSLPNCKAVDIGPGLNLLQEDNPDLIGSEIARWLSTLEISG

SEQ ID NO: 2883 - protein, 277 aa, Synthetic construct
MFHYVDVGPRDGTPVLFLHGNPTSSYVWRNIIPHVAPTHRCIAPDLIGMGKSDKPDLGYFFDDHVRFMDAFIEALGLEEVVLVVHDWGSALGFHWAKRNPERVKGIAFMEFIRPIPTWDEWPEFARETFQAFRTTDVGRKLIIDQNVFIEGTLPMGVVRPLTEVEMDHYREPFLNPVDREPLWRFPNELPIAGEPANIVALVDEYMDWLHQSPVPKLLFWGTPGVLIPPAEAARLAKSLPNCKAVDIGPGLNLLQEDNPDLIGSEIARWLSTLEISG

SEQ ID NO: 2884 - protein, 277 aa, Synthetic construct
MFHYVDVGPRDGTPVLFLHGNPTSSYVWRNIIPHVAPTHRCIAPDLIGMGKSDKPDLGYFFDDHVRFMDAFIEALGLEEVVLVVHDWGSALGFHWAKRNPERVKGIAFMEFIRPIPTWDEWPEFARETFQAFRTTDVGRKLIIDQNVFIEGTLPMGVVRPLTEVEMDHYREPFLNPVDREPLWRFPNELPIAGEPANIVALVEEYMDWLHTSPVPKLLFWGTPGVLIPPAEAARLAKSLPNCKAVDIGPGLNLLQEDNPDLIGSEIARWLSTLEISG

SEQ ID NO: 2885 - protein, 277 aa, Synthetic construct
MFHYVDVGPRDGTPVLFLHGNPTSSYVWRNIIPHVAPTHRCIAPDLIGMGKSDKPDLGYFFDDHVRFMDAFIEALGLEEVVLVVHDWGSALGFHWAKRNPERVKGIAFMEFIRPIPTWDEWPEFARETFQAFRTTDVGRKLIIDQNVFIEGTLPMGVVRPLTEVEMDHYREPFLNPVDREPLWRFPNELPIAGEPANIVALVEEYMDWLHQSPVPKLLFWGTPGVLIPPAEAARLAESLPNCKAVDIGPGLNLLQEDNPDLIGSEIARWLSTLEISG

SEQ ID NO: 2886 - protein, 277 aa, Synthetic construct
MFHYVDVGPRDGTPVLFLHGNPTSSYVWRNIIPHVAPTHRCIAPDLIGMGKSDKPDLGYFFDDHVRFMDAFIEALGLEEVVLVVHDWGSALGFHWAKRNPERVKGIAFMEFIRPIPTWDEWPEFARETFQAFRTTDVGRKLIIDQNVFIEGTLPMGVVRPLTEVEMDHYREPFLNPVDREPLWRFPNELPIAGEPANIVALVEEYMDWLHQSPVPKLLFWGTPGVLIPPAEAARLAKTLPNCKAVDIGPGLNLLQEDNPDLIGSEIARWLSTLEISG

SEQ ID NO: 2887 - protein, 277 aa, Synthetic construct
MFHYVDVGPRDGTPVLFLHGNPTSSYVWRNIIPHVAPTHRCIAPDLIGMGKSDKPDLGYFFDDHVRFMDAFIEALGLEEVVLVVHDWGSALGFHWAKRNPERVKGIAFMEFIRPIPTWDEWPEFARETFQAFRTTDVGRKLIIDQNVFIEGTLPMGVVRPLTEVEMDHYREPFLNPVDREPLWRFPNELPIAGEPANIVALVEEYMDWLHQSPVPKLLFWGTPGVLIPPAEAARLAKSLPNCKAVDVGPGLNLLQEDNPDLIGSEIARWLSTLEISG

SEQ ID NO: 2888 - protein, 277 aa, Synthetic construct
MFHYVDVGPRDGTPVLFLHGNPTSSYVWRNIIPHVAPTHRCIAPDLIGMGKSDKPDLGYFFDDHVRFMDAFIEALGLEEVVLVVHDWGSALGFHWAKRNPERVKGIAFMEFIRPIPTWDEWPEFARETFQAFRTTDVGRKLIIDQNVFIEGTLPMGVVRPLTEVEMDHYREPFLNPVDREPLWRFPNELPIAGEPANIVALVEEYMDWLHQSPVPKLLFWGTPGVLIPPAEAARLAKSLPNCKAVDIGPGLNLLQEDNPDLIGAEIARWLSTLEISG

SEQ ID NO: 2889 - protein, 277 aa, Synthetic construct
MFHYVDVGPRDGTPVLFLHGNPTSSYVWRNIIPHVAPTHRCIAPDLIGMGKSDKPDLGYFFDDHVRFMDAFIEALGLEEVVLVIHDWGSALGFHWAKRNPERVKGIAFMEFIRPIPTWDDWPEFARETFQAFRTTDVGRKLIIDQNVFIEGTLPMGVVRPLTEVEMDHYREPFLNPADREPLWRFPNELPIAGEPANIVALVEEYMDWLHQSPVPKLLFWGTPGVLIPPAEAARLAKSLPNCKAVDIGPGLNLLQEDNPDLIGSEIARWLSTLEISG

SEQ ID NO: 2890 - protein, 277 aa, Synthetic construct
MFHYVDVGPRDGTPVLFLHGNPTSSYVWRNIIPHVAPTHRCIAPDLIGMGKSDKPDLGYFFDDHVRFMDAFIEALGLEEVVLVIHDWGSALGFHWAKRNPERVKGIAFMEFIRPIPTWDDWPEFARETFQAFRTTDVGRKLIIDQNVFIEGTLPMGVVRPLTEVEMDHYREPFLNPVDREPLWRFPNELPIAGEPANVVALVEEYMDWLHQSPVPKLLFWGTPGVLIPPAEAARLAKSLPNCKAVDIGPGLNLLQEDNPDLIGSEIARWLSTLEISG

SEQ ID NO: 2891 - protein, 277 aa, Synthetic construct
MFHYVDVGPRDGTPVLFLHGNPTSSYVWRNIIPHVAPTHRCIAPDLIGMGKSDKPDLGYFFDDHVRFMDAFIEALGLEEVVLVIHDWGSALGFHWAKRNPERVKGIAFMEFIRPIPTWDDWPEFARETFQAFRTTDVGRKLIIDQNVFIEGTLPMGVVRPLTEVEMDHYREPFLNPVDREPLWRFPNELPIAGEPANIVAIVEEYMDWLHQSPVPKLLFWGTPGVLIPPAEAARLAKSLPNCKAVDIGPGLNLLQEDNPDLIGSEIARWLSTLEISG

SEQ ID NO: 2892 - protein, 277 aa, Synthetic construct
MFHYVDVGPRDGTPVLFLHGNPTSSYVWRNIIPHVAPTHRCIAPDLIGMGKSDKPDLGYFFDDHVRFMDAFIEALGLEEVVLVIHDWGSALGFHWAKRNPERVKGIAFMEFIRPIPTWDDWPEFARETFQAFRTTDVGRKLIIDQNVFIEGTLPMGVVRPLTEVEMDHYREPFLNPVDREPLWRFPNELPIAGEPANIVALVDEYMDWLHQSPVPKLLFWGTPGVLIPPAEAARLAKSLPNCKAVDIGPGLNLLQEDNPDLIGSEIARWLSTLEISG

SEQ ID NO: 2893 - protein, 277 aa, Synthetic construct
MFHYVDVGPRDGTPVLFLHGNPTSSYVWRNIIPHVAPTHRCIAPDLIGMGKSDKPDLGYFFDDHVRFMDAFIEALGLEEVVLVIHDWGSALGFHWAKRNPERVKGIAFMEFIRPIPTWDDWPEFARETFQAFRTTDVGRKLIIDQNVFIEGTLPMGVVRPLTEVEMDHYREPFLNPVDREPLWRFPNELPIAGEPANIVALVEEYMDWLHTSPVPKLLFWGTPGVLIPPAEAARLAKSLPNCKAVDIGPGLNLLQEDNPDLIGSEIARWLSTLEISG

SEQ ID NO: 2894 - protein, 277 aa, Synthetic construct
MFHYVDVGPRDGTPVLFLHGNPTSSYVWRNIIPHVAPTHRCIAPDLIGMGKSDKPDLGYFFDDHVRFMDAFIEALGLEEVVLVIHDWGSALGFHWAKRNPERVKGIAFMEFIRPIPTWDDWPEFARETFQAFRTTDVGRKLIIDQNVFIEGTLPMGVVRPLTEVEMDHYREPFLNPVDREPLWRFPNELPIAGEPANIVALVEEYMDWLHQSPVPKLLFWGTPGVLIPPAEAARLAESLPNCKAVDIGPGLNLLQEDNPDLIGSEIARWLSTLEISG

SEQ ID NO: 2895 - protein, 277 aa, Synthetic construct
MFHYVDVGPRDGTPVLFLHGNPTSSYVWRNIIPHVAPTHRCIAPDLIGMGKSDKPDLGYFFDDHVRFMDAFIEALGLEEVVLVIHDWGSALGFHWAKRNPERVKGIAFMEFIRPIPTWDDWPEFARETFQAFRTTDVGRKLIIDQNVFIEGTLPMGVVRPLTEVEMDHYREPFLNPVDREPLWRFPNELPIAGEPANIVALVEEYMDWLHQSPVPKLLFWGTPGVLIPPAEAARLAKTLPNCKAVDIGPGLNLLQEDNPDLIGSEIARWLSTLEISG

SEQ ID NO: 2896 - protein, 277 aa, Synthetic construct
MFHYVDVGPRDGTPVLFLHGNPTSSYVWRNIIPHVAPTHRCIAPDLIGMGKSDKPDLGYFFDDHVRFMDAFIEALGLEEVVLVIHDWGSALGFHWAKRNPERVKGIAFMEFIRPIPTWDDWPEFARETFQAFRTTDVGRKLIIDQNVFIEGTLPMGVVRPLTEVEMDHYREPFLNPVDREPLWRFPNELPIAGEPANIVALVEEYMDWLHQSPVPKLLFWGTPGVLIPPAEAARLAKSLPNCKAVDVGPGLNLLQEDNPDLIGSEIARWLSTLEISG

SEQ ID NO: 2897 - protein, 277 aa, Synthetic construct
MFHYVDVGPRDGTPVLFLHGNPTSSYVWRNIIPHVAPTHRCIAPDLIGMGKSDKPDLGYFFDDHVRFMDAFIEALGLEEVVLVIHDWGSALGFHWAKRNPERVKGIAFMEFIRPIPTWDDWPEFARETFQAFRTTDVGRKLIIDQNVFIEGTLPMGVVRPLTEVEMDHYREPFLNPVDREPLWRFPNELPIAGEPANIVALVEEYMDWLHQSPVPKLLFWGTPGVLIPPAEAARLAKSLPNCKAVDIGPGLNLLQEDNPDLIGAEIARWLSTLEISG

SEQ ID NO: 2898 - protein, 277 aa, Synthetic construct
MFHYVDVGPRDGTPVLFLHGNPTSSYVWRNIIPHVAPTHRCIAPDLIGMGKSDKPDLGYFFDDHVRFMDAFIEALGLEEVVLVIHDWGSALGFHWAKRNPERVKGIAFMEFIRPIPTWDEFPEFARETFQAFRTTDVGRKLIIDQNVFIEGTLPMGVVRPLTEVEMDHYREPFLNPADREPLWRFPNELPIAGEPANIVALVEEYMDWLHQSPVPKLLFWGTPGVLIPPAEAARLAKSLPNCKAVDIGPGLNLLQEDNPDLIGSEIARWLSTLEISG

SEQ ID NO: 2899 - protein, 277 aa, Synthetic construct
MFHYVDVGPRDGTPVLFLHGNPTSSYVWRNIIPHVAPTHRCIAPDLIGMGKSDKPDLGYFFDDHVRFMDAFIEALGLEEVVLVIHDWGSALGFHWAKRNPERVKGIAFMEFIRPIPTWDEFPEFARETFQAFRTTDVGRKLIIDQNVFIEGTLPMGVVRPLTEVEMDHYREPFLNPVDREPLWRFPNELPIAGEPANVVALVEEYMDWLHQSPVPKLLFWGTPGVLIPPAEAARLAKSLPNCKAVDIGPGLNLLQEDNPDLIGSEIARWLSTLEISG

SEQ ID NO: 2900 - protein, 277 aa, Synthetic construct
MFHYVDVGPRDGTPVLFLHGNPTSSYVWRNIIPHVAPTHRCIAPDLIGMGKSDKPDLGYFFDDHVRFMDAFIEALGLEEVVLVIHDWGSALGFHWAKRNPERVKGIAFMEFIRPIPTWDEFPEFARETFQAFRTTDVGRKLIIDQNVFIEGTLPMGVVRPLTEVEMDHYREPFLNPVDREPLWRFPNELPIAGEPANIVAIVEEYMDWLHQSPVPKLLFWGTPGVLIPPAEAARLAKSLPNCKAVDIGPGLNLLQEDNPDLIGSEIARWLSTLEISG

SEQ ID NO: 2901 - protein, 277 aa, Synthetic construct
MFHYVDVGPRDGTPVLFLHGNPTSSYVWRNIIPHVAPTHRCIAPDLIGMGKSDKPDLGYFFDDHVRFMDAFIEALGLEEVVLVIHDWGSALGFHWAKRNPERVKGIAFMEFIRPIPTWDEFPEFARETFQAFRTTDVGRKLIIDQNVFIEGTLPMGVVRPLTEVEMDHYREPFLNPVDREPLWRFPNELPIAGEPANIVALVDEYMDWLHQSPVPKLLFWGTPGVLIPPAEAARLAKSLPNCKAVDIGPGLNLLQEDNPDLIGSEIARWLSTLEISG

SEQ ID NO: 2902 - protein, 277 aa, Synthetic construct
MFHYVDVGPRDGTPVLFLHGNPTSSYVWRNIIPHVAPTHRCIAPDLIGMGKSDKPDLGYFFDDHVRFMDAFIEALGLEEVVLVIHDWGSALGFHWAKRNPERVKGIAFMEFIRPIPTWDEFPEFARETFQAFRTTDVGRKLIIDQNVFIEGTLPMGVVRPLTEVEMDHYREPFLNPVDREPLWRFPNELPIAGEPANIVALVEEYMDWLHTSPVPKLLFWGTPGVLIPPAEAARLAKSLPNCKAVDIGPGLNLLQEDNPDLIGSEIARWLSTLEISG

SEQ ID NO: 2903 - protein, 277 aa, Synthetic construct
MFHYVDVGPRDGTPVLFLHGNPTSSYVWRNIIPHVAPTHRCIAPDLIGMGKSDKPDLGYFFDDHVRFMDAFIEALGLEEVVLVIHDWGSALGFHWAKRNPERVKGIAFMEFIRPIPTWDEFPEFARETFQAFRTTDVGRKLIIDQNVFIEGTLPMGVVRPLTEVEMDHYREPFLNPVDREPLWRFPNELPIAGEPANIVALVEEYMDWLHQSPVPKLLFWGTPGVLIPPAEAARLAESLPNCKAVDIGPGLNLLQEDNPDLIGSEIARWLSTLEISG

SEQ ID NO: 2904 - protein, 277 aa, Synthetic construct
MFHYVDVGPRDGTPVLFLHGNPTSSYVWRNIIPHVAPTHRCIAPDLIGMGKSDKPDLGYFFDDHVRFMDAFIEALGLEEVVLVIHDWGSALGFHWAKRNPERVKGIAFMEFIRPIPTWDEFPEFARETFQAFRTTDVGRKLIIDQNVFIEGTLPMGVVRPLTEVEMDHYREPFLNPVDREPLWRFPNELPIAGEPANIVALVEEYMDWLHQSPVPKLLFWGTPGVLIPPAEAARLAKTLPNCKAVDIGPGLNLLQEDNPDLIGSEIARWLSTLEISG

SEQ ID NO: 2905 - protein, 277 aa, Synthetic construct
MFHYVDVGPRDGTPVLFLHGNPTSSYVWRNIIPHVAPTHRCIAPDLIGMGKSDKPDLGYFFDDHVRFMDAFIEALGLEEVVLVIHDWGSALGFHWAKRNPERVKGIAFMEFIRPIPTWDEFPEFARETFQAFRTTDVGRKLIIDQNVFIEGTLPMGVVRPLTEVEMDHYREPFLNPVDREPLWRFPNELPIAGEPANIVALVEEYMDWLHQSPVPKLLFWGTPGVLIPPAEAARLAKSLPNCKAVDVGPGLNLLQEDNPDLIGSEIARWLSTLEISG

SEQ ID NO: 2906 - protein, 277 aa, Synthetic construct
MFHYVDVGPRDGTPVLFLHGNPTSSYVWRNIIPHVAPTHRCIAPDLIGMGKSDKPDLGYFFDDHVRFMDAFIEALGLEEVVLVIHDWGSALGFHWAKRNPERVKGIAFMEFIRPIPTWDEFPEFARETFQAFRTTDVGRKLIIDQNVFIEGTLPMGVVRPLTEVEMDHYREPFLNPVDREPLWRFPNELPIAGEPANIVALVEEYMDWLHQSPVPKLLFWGTPGVLIPPAEAARLAKSLPNCKAVDIGPGLNLLQEDNPDLIGAEIARWLSTLEISG

SEQ ID NO: 2907 - protein, 277 aa, Synthetic construct
MFHYVDVGPRDGTPVLFLHGNPTSSYVWRNIIPHVAPTHRCIAPDLIGMGKSDKPDLGYFFDDHVRFMDAFIEALGLEEVVLVIHDWGSALGFHWAKRNPERVKGIAFMEFIRPIPTWDEWPEFARETFQAFRTTDVGRELIIDQNVFIEGTLPMGVVRPLTEVEMDHYREPFLNPADREPLWRFPNELPIAGEPANIVALVEEYMDWLHQSPVPKLLFWGTPGVLIPPAEAARLAKSLPNCKAVDIGPGLNLLQEDNPDLIGSEIARWLSTLEISG

SEQ ID NO: 2908 - protein, 277 aa, Synthetic construct
MFHYVDVGPRDGTPVLFLHGNPTSSYVWRNIIPHVAPTHRCIAPDLIGMGKSDKPDLGYFFDDHVRFMDAFIEALGLEEVVLVIHDWGSALGFHWAKRNPERVKGIAFMEFIRPIPTWDEWPEFARETFQAFRTTDVGRELIIDQNVFIEGTLPMGVVRPLTEVEMDHYREPFLNPVDREPLWRFPNELPIAGEPANVVALVEEYMDWLHQSPVPKLLFWGTPGVLIPPAEAARLAKSLPNCKAVDIGPGLNLLQEDNPDLIGSEIARWLSTLEISG

SEQ ID NO: 2909 - protein, 277 aa, Synthetic construct
MFHYVDVGPRDGTPVLFLHGNPTSSYVWRNIIPHVAPTHRCIAPDLIGMGKSDKPDLGYFFDDHVRFMDAFIEALGLEEVVLVIHDWGSALGFHWAKRNPERVKGIAFMEFIRPIPTWDEWPEFARETFQAFRTTDVGRELIIDQNVFIEGTLPMGVVRPLTEVEMDHYREPFLNPVDREPLWRFPNELPIAGEPANIVAIVEEYMDWLHQSPVPKLLFWGTPGVLIPPAEAARLAKSLPNCKAVDIGPGLNLLQEDNPDLIGSEIARWLSTLEISG

SEQ ID NO: 2910 - protein, 277 aa, Synthetic construct
MFHYVDVGPRDGTPVLFLHGNPTSSYVWRNIIPHVAPTHRCIAPDLIGMGKSDKPDLGYFFDDHVRFMDAFIEALGLEEVVLVIHDWGSALGFHWAKRNPERVKGIAFMEFIRPIPTWDEWPEFARETFQAFRTTDVGRELIIDQNVFIEGTLPMGVVRPLTEVEMDHYREPFLNPVDREPLWRFPNELPIAGEPANIVALVDEYMDWLHQSPVPKLLFWGTPGVLIPPAEAARLAKSLPNCKAVDIGPGLNLLQEDNPDLIGSEIARWLSTLEISG

SEQ ID NO: 2911 - protein, 277 aa, Synthetic construct
MFHYVDVGPRDGTPVLFLHGNPTSSYVWRNIIPHVAPTHRCIAPDLIGMGKSDKPDLGYFFDDHVRFMDAFIEALGLEEVVLVIHDWGSALGFHWAKRNPERVKGIAFMEFIRPIPTWDEWPEFARETFQAFRTTDVGRELIIDQNVFIEGTLPMGVVRPLTEVEMDHYREPFLNPVDREPLWRFPNELPIAGEPANIVALVEEYMDWLHTSPVPKLLFWGTPGVLIPPAEAARLAKSLPNCKAVDIGPGLNLLQEDNPDLIGSEIARWLSTLEISG

SEQ ID NO: 2912 - protein, 277 aa, Synthetic construct
MFHYVDVGPRDGTPVLFLHGNPTSSYVWRNIIPHVAPTHRCIAPDLIGMGKSDKPDLGYFFDDHVRFMDAFIEALGLEEVVLVIHDWGSALGFHWAKRNPERVKGIAFMEFIRPIPTWDEWPEFARETFQAFRTTDVGRELIIDQNVFIEGTLPMGVVRPLTEVEMDHYREPFLNPVDREPLWRFPNELPIAGEPANIVALVEEYMDWLHQSPVPKLLFWGTPGVLIPPAEAARLAESLPNCKAVDIGPGLNLLQEDNPDLIGSEIARWLSTLEISG

SEQ ID NO: 2913 - protein, 277 aa, Synthetic construct
MFHYVDVGPRDGTPVLFLHGNPTSSYVWRNIIPHVAPTHRCIAPDLIGMGKSDKPDLGYFFDDHVRFMDAFIEALGLEEVVLVIHDWGSALGFHWAKRNPERVKGIAFMEFIRPIPTWDEWPEFARETFQAFRTTDVGRELIIDQNVFIEGTLPMGVVRPLTEVEMDHYREPFLNPVDREPLWRFPNELPIAGEPANIVALVEEYMDWLHQSPVPKLLFWGTPGVLIPPAEAARLAKTLPNCKAVDIGPGLNLLQEDNPDLIGSEIARWLSTLEISG

SEQ ID NO: 2914 - protein, 277 aa, Synthetic construct
MFHYVDVGPRDGTPVLFLHGNPTSSYVWRNIIPHVAPTHRCIAPDLIGMGKSDKPDLGYFFDDHVRFMDAFIEALGLEEVVLVIHDWGSALGFHWAKRNPERVKGIAFMEFIRPIPTWDEWPEFARETFQAFRTTDVGRELIIDQNVFIEGTLPMGVVRPLTEVEMDHYREPFLNPVDREPLWRFPNELPIAGEPANIVALVEEYMDWLHQSPVPKLLFWGTPGVLIPPAEAARLAKSLPNCKAVDVGPGLNLLQEDNPDLIGSEIARWLSTLEISG

SEQ ID NO: 2915 - protein, 277 aa, Synthetic construct
MFHYVDVGPRDGTPVLFLHGNPTSSYVWRNIIPHVAPTHRCIAPDLIGMGKSDKPDLGYFFDDHVRFMDAFIEALGLEEVVLVIHDWGSALGFHWAKRNPERVKGIAFMEFIRPIPTWDEWPEFARETFQAFRTTDVGRELIIDQNVFIEGTLPMGVVRPLTEVEMDHYREPFLNPVDREPLWRFPNELPIAGEPANIVALVEEYMDWLHQSPVPKLLFWGTPGVLIPPAEAARLAKSLPNCKAVDIGPGLNLLQEDNPDLIGAEIARWLSTLEISG

SEQ ID NO: 2916 - protein, 277 aa, Synthetic construct
MFHYVDEGPRDGTPVLFLHGNPTSSYVWRNIIPHVAPTHRCIAPDLIGMGKSDKPDLGYFFDDHVRFMDAFIEALGLEEVVLVIHDWGSALGFHWAKRNPERVKGIAFMEFIRPIPTWDEWPEFARETFQAFRTTDVGRKLIIDQNVFIEGTLPMGVVRPLTEVEMDHYREPFLNPVDREPLWRFPNELPIAGEPANIVALVEEYMDWLHQSPVPKLLFWGTPGVLIPPAEAARLAKTLPNCKAVDIGPGLNLLQEDNPDLIGAEIARWLSTLEISG

SEQ ID NO: 2917 - protein, 277 aa, Synthetic construct
MFHYVDEGPRDGTPVLFLHGNPTSSYVWRNIIPHVAPTHRCIAPDLIGMGKSGKPDLGYFFDDHVRFMDAFIEALGLEEVVLVIHDWGSALGFHWAKRNPERVKGIAFMEFIRPIPTWDEWPEFARETFQAFRTTDVGRKLIIDQNVFIEGTLPMGVVRPLTEVEMDHYREPFLNPVDREPLWRFPNELPIAGEPANIVALVEEYMDWLHQSPVPKLLFWGTPGVLIPPAEAARLAKTLPNCKAVDIGPGLNLLQEDNPDLIGSEIARWLSTLEISG

SEQ ID NO: 2918 - protein, 277 aa, Synthetic construct
MFHYVDEGPRDGTPVLFLHGNPTSSYVWRNIIPHVAPTHRCIAPDLIGMGKSDKPDLGYFFDDHVRFMDAFIEALGLEEVVLVIHDWGSALGFHWAKRNPERVKGIAFMEFIRPIPTWDEWPEFARETFQAFRTTDVGRKLIIDQNVFIEGTLPMGVVRPLTEVEMDHYREPFLNPADREPLWRFPNELPIAGEPANIVALVEEYMDWLHQSPVPKLLFWGTPGVLIPPAEAARLAKTLPNCKAVDIGPGLNLLQEDNPDLIGSEIARWLSTLEISG

SEQ ID NO: 2919 - protein, 277 aa, Synthetic construct
MFHYVDEGPRDGTPVLFLHGNPTSSYVWRNIIPHVAPTHRCIAPDLIGMGKSDKPDLGYFFDDHVRFMDAFIEALGLEEVVLVIHDWGSALGFHWAKRNPERVKGIAFMEFIRPIPTWDEFPEFARETFQAFRTTDVGRKLIIDQNVFIEGTLPMGVVRPLTEVEMDHYREPFLNPVDREPLWRFPNELPIAGEPANIVALVEEYMDWLHQSPVPKLLFWGTPGVLIPPAEAARLAKTLPNCKAVDIGPGLNLLQEDNPDLIGSEIARWLSTLEISG

SEQ ID NO: 2920 - protein, 277 aa, Synthetic construct
MFHYVDEGPRDGTPVLFLHGNPTSSYVWRNIIPHVAPTHRCIAPDLIGMGKSDKPDLGYFFDDHVRFMDAFIEALGLEEVVLVIHDWGSALGFHWAKRNPERVKGIAFMEFIRPIPTWDEWPEFARETFQAFRTTDVGRKLIIDQNVFIEGTLPMGVVRPLTEVEMDHYREPFLNPVDREPLWRFPNELPIAGEPANVVALVEEYMDWLHQSPVPKLLFWGTPGVLIPPAEAARLAKTLPNCKAVDIGPGLNLLQEDNPDLIGSEIARWLSTLEISG

SEQ ID NO: 2921 - protein, 277 aa, Synthetic construct
MFHYVDEGPRDGTPVLFLHGNPTSSYVWRNIIPHVAPTHRCIAPDLIGMGKSGKPDLGYFFDDHVRFMDAFIEALGLEEVVLVIHDWGSALGFHWAKRNPERVKGIAFMEFIRPIPTWDEWPEFARETFQAFRTTDVGRKLIIDQNVFIEGTLPMGVVRPLTEVEMDHYREPFLNPADREPLWRFPNELPIAGEPANIVALVEEYMDWLHQSPVPKLLFWGTPGVLIPPAEAARLAKTLPNCKAVDIGPGLNLLQEDNPDLIGSEIARWLSTLEISG

SEQ ID NO: 2922 - protein, 277 aa, Synthetic construct
MFHYVDEGPRDGTPVLFLHGNPTSSYVWRNIIPHVAPTHRCIAPDLIGMGKSDKPDLGYFFDDHVRFMDAFIEALGLEEVVLVIHDWGSALGFHWAKRNPERVKGIAFMEFIRPIPTWDEFPEFARETFQAFRTTDVGRKLIIDQNVFIEGTLPMGVVRPLTEVEMDHYREPFLNPVDREPLWRFPNELPIAGEPANVVALVEEYMDWLHQSPVPKLLFWGTPGVLIPPAEAARLAKTLPNCKAVDIGPGLNLLQEDNPDLIGSEIARWLSTLEISG

SEQ ID NO: 2923 - protein, 277 aa, Synthetic construct
MFHYVDEGPRDGTPVLFLHGNPTSSYVWRNIIPHVAPTHRCIAPDLIGMGKSGKPDLGYFFDDHVRFMDAFIEALGLEEVVLVIHDWGSALGFHWAKRNPERVKGIAFMEFIRPIPTWDEWPEFARETFQAFRTTDVGRKLIIDQNVFIEGTLPMGVVRPLTEVEMDHYREPFLNPVDREPLWRFPNELPIAGEPANIVALVEEYMDWLHQSPVPKLLFWGTPGVLIPPAEAARLAKSLPNCKAVDIGPGLNLLQEDNPDLIGAEIARWLSTLEISG

SEQ ID NO: 2924 - protein, 277 aa, Synthetic construct
MFHYVDEGPRDGTPVLFLHGNPTSSYVWRNIIPHVAPTHRCIAPDLIGMGKSDKPDLGYFFDDHVRFMDAFIEALGLEEVVLVIHDWGSALGFHWAKRNPERVKGIAFMEFIRPIPTWDEWPEFARETFQAFRTTDVGRKLIIDQNVFIEGTLPMGVVRPLTEVEMDHYREPFLNPADREPLWRFPNELPIAGEPANIVALVEEYMDWLHQSPVPKLLFWGTPGVLIPPAEAARLAKSLPNCKAVDIGPGLNLLQEDNPDLIGAEIARWLSTLEISG

SEQ ID NO: 2925 - protein, 277 aa, Synthetic construct
MFHYVDEGPRDGTPVLFLHGNPTSSYVWRNIIPHVAPTHRCIAPDLIGMGKSDKPDLGYFFDDHVRFMDAFIEALGLEEVVLVIHDWGSALGFHWAKRNPERVKGIAFMEFIRPIPTWDEFPEFARETFQAFRTTDVGRKLIIDQNVFIEGTLPMGVVRPLTEVEMDHYREPFLNPVDREPLWRFPNELPIAGEPANIVALVEEYMDWLHQSPVPKLLFWGTPGVLIPPAEAARLAKSLPNCKAVDIGPGLNLLQEDNPDLIGAEIARWLSTLEISG

SEQ ID NO: 2926 - protein, 277 aa, Synthetic construct
MFHYVDEGPRDGTPVLFLHGNPTSSYVWRNIIPHVAPTHRCIAPDLIGMGKSDKPDLGYFFDDHVRFMDAFIEALGLEEVVLVIHDWGSALGFHWAKRNPERVKGIAFMEFIRPIPTWDEWPEFARETFQAFRTTDVGRKLIIDQNVFIEGTLPMGVVRPLTEVEMDHYREPFLNPVDREPLWRFPNELPIAGEPANVVALVEEYMDWLHQSPVPKLLFWGTPGVLIPPAEAARLAKSLPNCKAVDIGPGLNLLQEDNPDLIGAEIARWLSTLEISG

SEQ ID NO: 2927 - protein, 277 aa, Synthetic construct
MFHYVDEGPRDGTPVLFLHGNPTSSYVWRNIIPHVAPTHRCIAPDLIGMGKSGKPDLGYFFDDHVRFMDAFIEALGLEEVVLVIHDWGSALGFHWAKRNPERVKGIAFMEFIRPIPTWDEWPEFARETFQAFRTTDVGRKLIIDQNVFIEGTLPMGVVRPLTEVEMDHYREPFLNPADREPLWRFPNELPIAGEPANIVALVEEYMDWLHQSPVPKLLFWGTPGVLIPPAEAARLAKSLPNCKAVDIGPGLNLLQEDNPDLIGAEIARWLSTLEISG

SEQ ID NO: 2928 - protein, 277 aa, Synthetic construct
MFHYVDEGPRDGTPVLFLHGNPTSSYVWRNIIPHVAPTHRCIAPDLIGMGKSDKPDLGYFFDDHVRFMDAFIEALGLEEVVLVIHDWGSALGFHWAKRNPERVKGIAFMEFIRPIPTWDEFPEFARETFQAFRTTDVGRKLIIDQNVFIEGTLPMGVVRPLTEVEMDHYREPFLNPVDREPLWRFPNELPIAGEPANVVALVEEYMDWLHQSPVPKLLFWGTPGVLIPPAEAARLAKSLPNCKAVDIGPGLNLLQEDNPDLIGAEIARWLSTLEISG

SEQ ID NO: 2929 - protein, 277 aa, Synthetic construct
MFHYVDEGPRDGTPVLFLHGNPTSSYVWRNIIPHVAPTHRCIAPDLIGMGKSGKPDLGYFFDDHVRFMDAFIEALGLEEVVLVIHDWGSALGFHWAKRNPERVKGIAFMEFIRPIPTWDEWPEFARETFQAFRTTDVGRKLIIDQNVFIEGTLPMGVVRPLTEVEMDHYREPFLNPADREPLWRFPNELPIAGEPANIVALVEEYMDWLHQSPVPKLLFWGTPGVLIPPAEAARLAKSLPNCKAVDIGPGLNLLQEDNPDLIGSEIARWLSTLEISG

SEQ ID NO: 2930 - protein, 277 aa, Synthetic construct
MFHYVDVGPRDGTPVLFLHGNPTSSYVWRNIIPHVAPTHRCIAPDLIGMGKSGKPDLGYFFDDHVRFMDAFIEALGLEEVVLVIHDWGSALGFHWAKRNPERVKGIAFMEFIRPIPTWDEWPEFARETFQAFRTTDVGRKLIIDQNVFIEGTLPMGVVRPLTEVEMDHYREPFLNPADREPLWRFPNELPIAGEPANIVALVEEYMDWLHQSPVPKLLFWGTPGVLIPPAEAARLAKTLPNCKAVDIGPGLNLLQEDNPDLIGSEIARWLSTLEISG

SEQ ID NO: 2931 - protein, 277 aa, Synthetic construct
MFHYVDVGPRDGTPVLFLHGNPTSSYVWRNIIPHVAPTHRCIAPDLIGMGKSGKPDLGYFFDDHVRFMDAFIEALGLEEVVLVIHDWGSALGFHWAKRNPERVKGIAFMEFIRPIPTWDEWPEFARETFQAFRTTDVGRKLIIDQNVFIEGTLPMGVVRPLTEVEMDHYREPFLNPADREPLWRFPNELPIAGEPANIVALVEEYMDWLHQSPVPKLLFWGTPGVLIPPAEAARLAKSLPNCKAVDIGPGLNLLQEDNPDLIGAEIARWLSTLEISG

SEQ ID NO: 2932 - protein, 277 aa, Synthetic construct
MFHYVDVGPRDGTPVLFLHGNPTSSYVWRNIIPHVAPTHRCIAPDLIGMGKSGKPDLGYFFDDHVRFMDAFIEALGLEEVVLVIHDWGSALGFHWAKRNPERVKGIAFMEFIRPIPTWDEFPEFARETFQAFRTTDVGRKLIIDQNVFIEGTLPMGVVRPLTEVEMDHYREPFLNPADREPLWRFPNELPIAGEPANIVALVEEYMDWLHQSPVPKLLFWGTPGVLIPPAEAARLAKSLPNCKAVDIGPGLNLLQEDNPDLIGSEIARWLSTLEISG

SEQ ID NO: 2933 - protein, 277 aa, Synthetic construct
MFHYVDVGPRDGTPVLFLHGNPTSSYVWRNIIPHVAPTHRCIAPDLIGMGKSGKPDLGYFFDDHVRFMDAFIEALGLEEVVLVIHDWGSALGFHWAKRNPERVKGIAFMEFIRPIPTWDEWPEFARETFQAFRTTDVGRKLIIDQNVFIEGTLPMGVVRPLTEVEMDHYREPFLNPADREPLWRFPNELPIAGEPANVVALVEEYMDWLHQSPVPKLLFWGTPGVLIPPAEAARLAKSLPNCKAVDIGPGLNLLQEDNPDLIGSEIARWLSTLEISG

SEQ ID NO: 2934 - protein, 277 aa, Synthetic construct
MFHYVDVGPRDGTPVLFLHGNPTSSYVWRNIIPHVAPTHRCIAPDLIGMGKSGKPDLGYFFDDHVRFMDAFIEALGLEEVVLVIHDWGSALGFHWAKRNPERVKGIAFMEFIRPIPTWDEFPEFARETFQAFRTTDVGRKLIIDQNVFIEGTLPMGVVRPLTEVEMDHYREPFLNPADREPLWRFPNELPIAGEPANVVALVEEYMDWLHQSPVPKLLFWGTPGVLIPPAEAARLAKSLPNCKAVDIGPGLNLLQEDNPDLIGSEIARWLSTLEISG

SEQ ID NO: 2935 - protein, 277 aa, Synthetic construct
MFHYVDVGPRDGTPVLFLHGNPTSSYVWRNIIPHVAPTHRCIAPDLIGMGKSGKPDLGYFFDDHVRFMDAFIEALGLEEVVLVIHDWGSALGFHWAKRNPERVKGIAFMEFIRPIPTWDEWPEFARETFQAFRTTDVGRKLIIDQNVFIEGTLPMGVVRPLTEVEMDHYREPFLNPADREPLWRFPNELPIAGEPANIVALVEEYMDWLHQSPVPKLLFWGTPGVLIPPAEAARLAKTLPNCKAVDIGPGLNLLQEDNPDLIGAEIARWLSTLEISG

SEQ ID NO: 2936 - protein, 277 aa, Synthetic construct
MFHYVDEGPRDGTPVLFLHGNPTSSYVWRNIIPHVAPTHRCIAPDLIGMGKSDKPDLGYFFDDHVRFMDAFIEALGLEEVVLVIHDWGSALGFHWAKRNPERVKGIAFMEFIRPIPTWDEFPEFARETFQAFRTTDVGRKLIIDQNVFIEGTLPMGVVRPLTEVEMDHYREPFLNPVDREPLWRFPNELPIAGEPANVVALVEEYMDWLHQSPVPKLLFWGTPGVLIPPAEAARLAKSLPNCKAVDIGPGLNLLQEDNPDLIGSEIARWLSTLEISG

SEQ ID NO: 2937 - protein, 277 aa, Synthetic construct
MFHYVDVGPRDGTPVLFLHGNPTSSYVWRNIIPHVAPTHRCIAPDLIGMGKSDKPDLGYFFDDHVRFMDAFIEALGLEEVVLVIHDWGSALGFHWAKRNPERVKGIAFMEFIRPIPTWDEFPEFARETFQAFRTTDVGRKLIIDQNVFIEGTLPMGVVRPLTEVEMDHYREPFLNPVDREPLWRFPNELPIAGEPANVVALVEEYMDWLHQSPVPKLLFWGTPGVLIPPAEAARLAKSLPNCKAVDIGPGLNLLQEDNPDLIGAEIARWLSTLEISG

SEQ ID NO: 2938 - protein, 277 aa, Synthetic construct
MFHYVDVGPRDGTPVLFLHGNPTSSYVWRNIIPHVAPTHRCIAPDLIGMGKSGKPDLGYFFDDHVRFMDAFIEALGLEEVVLVIHDWGSALGFHWAKRNPERVKGIAFMEFIRPIPTWDEFPEFARETFQAFRTTDVGRKLIIDQNVFIEGTLPMGVVRPLTEVEMDHYREPFLNPVDREPLWRFPNELPIAGEPANVVALVEEYMDWLHQSPVPKLLFWGTPGVLIPPAEAARLAKSLPNCKAVDIGPGLNLLQEDNPDLIGSEIARWLSTLEISG

SEQ ID NO: 2939 - protein, 277 aa, Synthetic construct
MFHYVDVGPRDGTPVLFLHGNPTSSYVWRNIIPHVAPTHRCIAPDLIGMGKSDKPDLGYFFDDHVRFMDAFIEALGLEEVVLVIHDWGSALGFHWAKRNPERVKGIAFMEFIRPIPTWDEFPEFARETFQAFRTTDVGRKLIIDQNVFIEGTLPMGVVRPLTEVEMDHYREPFLNPADREPLWRFPNELPIAGEPANVVALVEEYMDWLHQSPVPKLLFWGTPGVLIPPAEAARLAKSLPNCKAVDIGPGLNLLQEDNPDLIGSEIARWLSTLEISG

SEQ ID NO: 2940 - protein, 277 aa, Synthetic construct
MFHYVDVGPRDGTPVLFLHGNPTSSYVWRNIIPHVAPTHRCIAPDLIGMGKSDKPDLGYFFDDHVRFMDAFIEAMELEEVVLVIHDWGSALGFHWAKRNPERVKGIAFMEFIRPIPTWDEWPEFARETFQAFRTTDVGRKLIIDQNVFIEGTLPMGVVRPLTEVEMDHYREPFLNPVDREPLWRFPNELPIAGEPANIVALVEEYMDWLHQSPVPKLLFWGTPGVLIPPAEAARLAKSLPNCKAVDIGPGLNLLQEDNPDLIGSEIARWLSTLEISG

SEQ ID NO: 2941 - protein, 277 aa, Synthetic construct
MFHYVDVGPRDGTPVLFLHGNPTSSYVWRNIIPHVAPTHRCIAPDLIGMGKSDKPDLGYFFDDHVRFMDAFIEAMGLEEVVLVIHDWGAALGFHWAKRNPERVKGIAFMEFIRPIPTWDEWPEFARETFQAFRTTDVGRKLIIDQNVFIEGTLPMGVVRPLTEVEMDHYREPFLNPVDREPLWRFPNELPIAGEPANIVALVEEYMDWLHQSPVPKLLFWGTPGVLIPPAEAARLAKSLPNCKAVDIGPGLNLLQEDNPDLIGSEIARWLSTLEISG

SEQ ID NO: 2942 - protein, 277 aa, Synthetic construct
MFHYVDVGPRDGTPVLFLHGNPTSSYVWRNIIPHVAPTHRCIAPDLIGMGKSDKPDLGYFFDDHVRFMDAFIEAMGLEEVVLVIHDWGSALGFHWAKRYPERVKGIAFMEFIRPIPTWDEWPEFARETFQAFRTTDVGRKLIIDQNVFIEGTLPMGVVRPLTEVEMDHYREPFLNPVDREPLWRFPNELPIAGEPANIVALVEEYMDWLHQSPVPKLLFWGTPGVLIPPAEAARLAKSLPNCKAVDIGPGLNLLQEDNPDLIGSEIARWLSTLEISG

SEQ ID NO: 2943 - protein, 277 aa, Synthetic construct
MFHYVDVGPRDGTPVLFLHGNPTSSYVWRNIIPHVAPTHRCIAPDLIGMGKSDKPDLGYFFDDHVRFMDAFIEAMGLEEVVLVIHDWGSALGFHWAKRNPERVKGIAFFEFIRPIPTWDEWPEFARETFQAFRTTDVGRKLIIDQNVFIEGTLPMGVVRPLTEVEMDHYREPFLNPVDREPLWRFPNELPIAGEPANIVALVEEYMDWLHQSPVPKLLFWGTPGVLIPPAEAARLAKSLPNCKAVDIGPGLNLLQEDNPDLIGSEIARWLSTLEISG

SEQ ID NO: 2944 - protein, 277 aa, Synthetic construct
MFHYVDVGPRDGTPVLFLHGNPTSSYVWRNIIPHVAPTHRCIAPDLIGMGKSDKPDLGYFFDDHVRFMDAFIEAMGLEEVVLVIHDWGSALGFHWAKRNPERVKGIAFMEFIRPIPTWDEWPEFARETFQAFRTEDVGRKLIIDQNVFIEGTLPMGVVRPLTEVEMDHYREPFLNPVDREPLWRFPNELPIAGEPANIVALVEEYMDWLHQSPVPKLLFWGTPGVLIPPAEAARLAKSLPNCKAVDIGPGLNLLQEDNPDLIGSEIARWLSTLEISG

SEQ ID NO: 2945 - protein, 277 aa, Synthetic construct
MFHYVDVGPRDGTPVLFLHGNPTSSYVWRNIIPHVAPTHRCIAPDLIGMGKSDKPDLGYFFDDHVRFMDAFIEAMGLEEVVLVIHDWGSALGFHWAKRNPERVKGIAFMEFIRPIPTWDEWPEFARETFQAFRTTDVGRKLIIDQNVFIEGTLPMGVVRPLTEVEMDHYREPFLNPEDREPLWRFPNELPIAGEPANIVALVEEYMDWLHQSPVPKLLFWGTPGVLIPPAEAARLAKSLPNCKAVDIGPGLNLLQEDNPDLIGSEIARWLSTLEISG

SEQ ID NO: 2946 - protein, 277 aa, Synthetic construct
MFHYVDVGPRDGTPVLFLHGNPTSSYVWRNIIPHVAPTHRCIAPDLIGMGKSDKPDLGYFFDDHVRFMDAFIEAMGLEEVVLVIHDWGSALGFHWAKRNPERVKGIAFMEFIRPIPTWDEWPEFARETFQAFRTTDVGRKLIIDQNVFIEGTLPMGVVRPLTEVEMDHYREPFLNPVDREPLWRFPNELPIAGEPANIVKLVEEYMDWLHQSPVPKLLFWGTPGVLIPPAEAARLAKSLPNCKAVDIGPGLNLLQEDNPDLIGSEIARWLSTLEISG

SEQ ID NO: 2947 - protein, 277 aa, Synthetic construct; identical to SEQ ID NO: 2940

SEQ ID NO: 2948 - protein, 277 aa, Synthetic construct
MFHYVDVGPRDGTPVLFLHGNPTSSYVWRNIIPHVAPTHRCIAPDLIGMGKSDKPDLGYFFDDHVRFMDAFIEALELEEVVLVIHDWGAALGFHWAKRNPERVKGIAFMEFIRPIPTWDEWPEFARETFQAFRTTDVGRKLIIDQNVFIEGTLPMGVVRPLTEVEMDHYREPFLNPVDREPLWRFPNELPIAGEPANIVALVEEYMDWLHQSPVPKLLFWGTPGVLIPPAEAARLAKSLPNCKAVDIGPGLNLLQEDNPDLIGSEIARWLSTLEISG

SEQ ID NO: 2949 - protein, 277 aa, Synthetic construct
MFHYVDVGPRDGTPVLFLHGNPTSSYVWRNIIPHVAPTHRCIAPDLIGMGKSDKPDLGYFFDDHVRFMDAFIEALELEEVVLVIHDWGSALGFHWAKRYPERVKGIAFMEFIRPIPTWDEWPEFARETFQAFRTTDVGRKLIIDQNVFIEGTLPMGVVRPLTEVEMDHYREPFLNPVDREPLWRFPNELPIAGEPANIVALVEEYMDWLHQSPVPKLLFWGTPGVLIPPAEAARLAKSLPNCKAVDIGPGLNLLQEDNPDLIGSEIARWLSTLEISG

SEQ ID NO: 2950 - protein, 277 aa, Synthetic construct
MFHYVDVGPRDGTPVLFLHGNPTSSYVWRNIIPHVAPTHRCIAPDLIGMGKSDKPDLGYFFDDHVRFMDAFIEALELEEVVLVIHDWGSALGFHWAKRNPERVKGIAFFEFIRPIPTWDEWPEFARETFQAFRTTDVGRKLIIDQNVFIEGTLPMGVVRPLTEVEMDHYREPFLNPVDREPLWRFPNELPIAGEPANIVALVEEYMDWLHQSPVPKLLFWGTPGVLIPPAEAARLAKSLPNCKAVDIGPGLNLLQEDNPDLIGSEIARWLSTLEISG

SEQ ID NO: 2951 - protein, 277 aa, Synthetic construct
MFHYVDVGPRDGTPVLFLHGNPTSSYVWRNIIPHVAPTHRCIAPDLIGMGKSDKPDLGYFFDDHVRFMDAFIEALELEEVVLVIHDWGSALGFHWAKRNPERVKGIAFMEFIRPIPTWDEWPEFARETFQAFRTEDVGRKLIIDQNVFIEGTLPMGVVRPLTEVEMDHYREPFLNPVDREPLWRFPNELPIAGEPANIVALVEEYMDWLHQSPVPKLLFWGTPGVLIPPAEAARLAKSLPNCKAVDIGPGLNLLQEDNPDLIGSEIARWLSTLEISG

SEQ ID NO: 2952 - protein, 277 aa, Synthetic construct
MFHYVDVGPRDGTPVLFLHGNPTSSYVWRNIIPHVAPTHRCIAPDLIGMGKSDKPDLGYFFDDHVRFMDAFIEALELEEVVLVIHDWGSALGFHWAKRNPERVKGIAFMEFIRPIPTWDEWPEFARETFQAFRTTDVGRKLIIDQNVFIEGTLPMGVVRPLTEVEMDHYREPFLNPEDREPLWRFPNELPIAGEPANIVALVEEYMDWLHQSPVPKLLFWGTPGVLIPPAEAARLAKSLPNCKAVDIGPGLNLLQEDNPDLIGSEIARWLSTLEISG

SEQ ID NO: 2953 - protein, 277 aa, Synthetic construct
MFHYVDVGPRDGTPVLFLHGNPTSSYVWRNIIPHVAPTHRCIAPDLIGMGKSDKPDLGYFFDDHVRFMDAFIEALELEEVVLVIHDWGSALGFHWAKRNPERVKGIAFMEFIRPIPTWDEWPEFARETFQAFRTTDVGRKLIIDQNVFIEGTLPMGVVRPLTEVEMDHYREPFLNPVDREPLWRFPNELPIAGEPANIVKLVEEYMDWLHQSPVPKLLFWGTPGVLIPPAEAARLAKSLPNCKAVDIGPGLNLLQEDNPDLIGSEIARWLSTLEISG

SEQ ID NO: 2954 - protein, 277 aa, Synthetic construct; identical to SEQ ID NO: 2941

SEQ ID NO: 2955 - protein, 277 aa, Synthetic construct; identical to SEQ ID NO: 2948

SEQ ID NO: 2956 - protein, 277 aa, Synthetic construct
MFHYVDVGPRDGTPVLFLHGNPTSSYVWRNIIPHVAPTHRCIAPDLIGMGKSDKPDLGYFFDDHVRFMDAFIEALGLEEVVLVIHDWGAALGFHWAKRYPERVKGIAFMEFIRPIPTWDEWPEFARETFQAFRTTDVGRKLIIDQNVFIEGTLPMGVVRPLTEVEMDHYREPFLNPVDREPLWRFPNELPIAGEPANIVALVEEYMDWLHQSPVPKLLFWGTPGVLIPPAEAARLAKSLPNCKAVDIGPGLNLLQEDNPDLIGSEIARWLSTLEISG

SEQ ID NO: 2957 - protein, 277 aa, Synthetic construct
MFHYVDVGPRDGTPVLFLHGNPTSSYVWRNIIPHVAPTHRCIAPDLIGMGKSDKPDLGYFFDDHVRFMDAFIEALGLEEVVLVIHDWGAALGFHWAKRNPERVKGIAFFEFIRPIPTWDEWPEFARETFQAFRTTDVGRKLIIDQNVFIEGTLPMGVVRPLTEVEMDHYREPFLNPVDREPLWRFPNELPIAGEPANIVALVEEYMDWLHQSPVPKLLFWGTPGVLIPPAEAARLAKSLPNCKAVDIGPGLNLLQEDNPDLIGSEIARWLSTLEISG

SEQ ID NO: 2958 - protein, 277 aa, Synthetic construct
MFHYVDVGPRDGTPVLFLHGNPTSSYVWRNIIPHVAPTHRCIAPDLIGMGKSDKPDLGYFFDDHVRFMDAFIEALGLEEVVLVIHDWGAALGFHWAKRNPERVKGIAFMEFIRPIPTWDEWPEFARETFQAFRTEDVGRKLIIDQNVFIEGTLPMGVVRPLTEVEMDHYREPFLNPVDREPLWRFPNELPIAGEPANIVALVEEYMDWLHQSPVPKLLFWGTPGVLIPPAEAARLAKSLPNCKAVDIGPGLNLLQEDNPDLIGSEIARWLSTLEISG

SEQ ID NO: 2959 - protein, 277 aa, Synthetic construct
MFHYVDVGPRDGTPVLFLHGNPTSSYVWRNIIPHVAPTHRCIAPDLIGMGKSDKPDLGYFFDDHVRFMDAFIEALGLEEVVLVIHDWGAALGFHWAKRNPERVKGIAFMEFIRPIPTWDEWPEFARETFQAFRTTDVGRKLIIDQNVFIEGTLPMGVVRPLTEVEMDHYREPFLNPEDREPLWRFPNELPIAGEPANIVALVEEYMDWLHQSPVPKLLFWGTPGVLIPPAEAARLAKSLPNCKAVDIGPGLNLLQEDNPDLIGSEIARWLSTLEISG

SEQ ID NO: 2960 - protein, 277 aa, Synthetic construct
MFHYVDVGPRDGTPVLFLHGNPTSSYVWRNIIPHVAPTHRCIAPDLIGMGKSDKPDLGYFFDDHVRFMDAFIEALGLEEVVLVIHDWGAALGFHWAKRNPERVKGIAFMEFIRPIPTWDEWPEFARETFQAFRTTDVGRKLIIDQNVFIEGTLPMGVVRPLTEVEMDHYREPFLNPVDREPLWRFPNELPIAGEPANIVKLVEEYMDWLHQSPVPKLLFWGTPGVLIPPAEAARLAKSLPNCKAVDIGPGLNLLQEDNPDLIGSEIARWLSTLEISG

SEQ ID NO: 2961 - protein, 277 aa, Synthetic construct; identical to SEQ ID NO: 2942

SEQ ID NO: 2962 - protein, 277 aa, Synthetic construct; identical to SEQ ID NO: 2949

SEQ ID NO: 2963 - protein, 277 aa, Synthetic construct; identical to SEQ ID NO: 2956

SEQ ID NO: 2964 - protein, 277 aa, Synthetic construct
MFHYVDVGPRDGTPVLFLHGNPTSSYVWRNIIPHVAPTHRCIAPDLIGMGKSDKPDLGYFFDDHVRFMDAFIEALGLEEVVLVIHDWGSALGFHWAKRYPERVKGIAFFEFIRPIPTWDEWPEFARETFQAFRTTDVGRKLIIDQNVFIEGTLPMGVVRPLTEVEMDHYREPFLNPVDREPLWRFPNELPIAGEPANIVALVEEYMDWLHQSPVPKLLFWGTPGVLIPPAEAARLAKSLPNCKAVDIGPGLNLLQEDNPDLIGSEIARWLSTLEISG

SEQ ID NO: 2965 - protein, 277 aa, Synthetic construct
MFHYVDVGPRDGTPVLFLHGNPTSSYVWRNIIPHVAPTHRCIAPDLIGMGKSDKPDLGYFFDDHVRFMDAFIEALGLEEVVLVIHDWGSALGFHWAKRYPERVKGIAFMEFIRPIPTWDEWPEFARETFQAFRTEDVGRKLIIDQNVFIEGTLPMGVVRPLTEVEMDHYREPFLNPVDREPLWRFPNELPIAGEPANIVALVEEYMDWLHQSPVPKLLFWGTPGVLIPPAEAARLAKSLPNCKAVDIGPGLNLLQEDNPDLIGSEIARWLSTLEISG

SEQ ID NO: 2966 - protein, 277 aa, Synthetic construct
MFHYVDVGPRDGTPVLFLHGNPTSSYVWRNIIPHVAPTHRCIAPDLIGMGKSDKPDLGYFFDDHVRFMDAFIEALGLEEVVLVIHDWGSALGFHWAKRYPERVKGIAFMEFIRPIPTWDEWPEFARETFQAFRTTDVGRKLIIDQNVFIEGTLPMGVVRPLTEVEMDHYREPFLNPEDREPLWRFPNELPIAGEPANIVALVEEYMDWLHQSPVPKLLFWGTPGVLIPPAEAARLAKSLPNCKAVDIGPGLNLLQEDNPDLIGSEIARWLSTLEISG

SEQ ID NO: 2967 - protein, 277 aa, Synthetic construct
MFHYVDVGPRDGTPVLFLHGNPTSSYVWRNIIPHVAPTHRCIAPDLIGMGKSDKPDLGYFFDDHVRFMDAFIEALGLEEVVLVIHDWGSALGFHWAKRYPERVKGIAFMEFIRPIPTWDEWPEFARETFQAFRTTDVGRKLIIDQNVFIEGTLPMGVVRPLTEVEMDHYREPFLNPVDREPLWRFPNELPIAGEPANIVKLVEEYMDWLHQSPVPKLLFWGTPGVLIPPAEAARLAKSLPNCKAVDIGPGLNLLQEDNPDLIGSEIARWLSTLEISG

SEQ ID NO: 2968 - protein, 277 aa, Synthetic construct; identical to SEQ ID NO: 2943

SEQ ID NO: 2969 - protein, 277 aa, Synthetic construct; identical to SEQ ID NO: 2950

SEQ ID NO: 2970 - protein, 277 aa, Synthetic construct; identical to SEQ ID NO: 2957

SEQ ID NO: 2971 - protein, 277 aa, Synthetic construct; identical to SEQ ID NO: 2964

SEQ ID NO: 2972 - protein, 277 aa, Synthetic construct
MFHYVDVGPRDGTPVLFLHGNPTSSYVWRNIIPHVAPTHRCIAPDLIGMGKSDKPDLGYFFDDHVRFMDAFIEALGLEEVVLVIHDWGSALGFHWAKRNPERVKGIAFFEFIRPIPTWDEWPEFARETFQAFRTEDVGRKLIIDQNVFIEGTLPMGVVRPLTEVEMDHYREPFLNPVDREPLWRFPNELPIAGEPANIVALVEEYMDWLHQSPVPKLLFWGTPGVLIPPAEAARLAKSLPNCKAVDIGPGLNLLQEDNPDLIGSEIARWLSTLEISG

SEQ ID NO: 2973 - protein, 277 aa, Synthetic construct
MFHYVDVGPRDGTPVLFLHGNPTSSYVWRNIIPHVAPTHRCIAPDLIGMGKSDKPDLGYFFDDHVRFMDAFIEALGLEEVVLVIHDWGSALGFHWAKRNPERVKGIAFFEFIRPIPTWDEWPEFARETFQAFRTTDVGRKLIIDQNVFIEGTLPMGVVRPLTEVEMDHYREPFLNPEDREPLWRFPNELPIAGEPANIVALVEEYMDWLHQSPVPKLLFWGTPGVLIPPAEAARLAKSLPNCKAVDIGPGLNLLQEDNPDLIGSEIARWLSTLEISG

SEQ ID NO: 2974 - protein, 277 aa, Synthetic construct
MFHYVDVGPRDGTPVLFLHGNPTSSYVWRNIIPHVAPTHRCIAPDLIGMGKSDKPDLGYFFDDHVRFMDAFIEALGLEEVVLVIHDWGSALGFHWAKRNPERVKGIAFFEFIRPIPTWDEWPEFARETFQAFRTTDVGRKLIIDQNVFIEGTLPMGVVRPLTEVEMDHYREPFLNPVDREPLWRFPNELPIAGEPANIVKLVEEYMDWLHQSPVPKLLFWGTPGVLIPPAEAARLAKSLPNCKAVDIGPGLNLLQEDNPDLIGSEIARWLSTLEISG

SEQ ID NO: 2975 - protein, 277 aa, Synthetic construct; identical to SEQ ID NO: 2944

SEQ ID NO: 2976 - protein, 277 aa, Synthetic construct; identical to SEQ ID NO: 2951

SEQ ID NO: 2977 - protein, 277 aa, Synthetic construct; identical to SEQ ID NO: 2958

SEQ ID NO: 2978 - protein, 277 aa, Synthetic construct; identical to SEQ ID NO: 2965

SEQ ID NO: 2979 - protein, 277 aa, Synthetic construct; identical to SEQ ID NO: 2972

SEQ ID NO: 2980 - protein, 277 aa, Synthetic construct
MFHYVDVGPRDGTPVLFLHGNPTSSYVWRNIIPHVAPTHRCIAPDLIGMGKSDKPDLGYFFDDHVRFMDAFIEALGLEEVVLVIHDWGSALGFHWAKRNPERVKGIAFMEFIRPIPTWDEWPEFARETFQAFRTEDVGRKLIIDQNVFIEGTLPMGVVRPLTEVEMDHYREPFLNPEDREPLWRFPNELPIAGEPANIVALVEEYMDWLHQSPVPKLLFWGTPGVLIPPAEAARLAKSLPNCKAVDIGPGLNLLQEDNPDLIGSEIARWLSTLEISG

SEQ ID NO: 2981 - protein, 277 aa, Synthetic construct
MFHYVDVGPRDGTPVLFLHGNPTSSYVWRNIIPHVAPTHRCIAPDLIGMGKSDKPDLGYFFDDHVRFMDAFIEALGLEEVVLVIHDWGSALGFHWAKRNPERVKGIAFMEFIRPIPTWDEWPEFARETFQAFRTEDVGRKLIIDQNVFIEGTLPMGVVRPLTEVEMDHYREPFLNPVDREPLWRFPNELPIAGEPANIVKLVEEYMDWLHQSPVPKLLFWGTPGVLIPPAEAARLAKSLPNCKAVDIGPGLNLLQEDNPDLIGSEIARWLSTLEISG

SEQ ID NO: 2982 - protein, 277 aa, Synthetic construct; identical to SEQ ID NO: 2945

SEQ ID NO: 2983 - protein, 277 aa, Synthetic construct; identical to SEQ ID NO: 2952

SEQ ID NO: 2984 - protein, 277 aa, Synthetic construct; identical to SEQ ID NO: 2959

SEQ ID NO: 2985 - protein, 277 aa, Synthetic construct; identical to SEQ ID NO: 2966

SEQ ID NO: 2986 - protein, 277 aa, Synthetic construct; identical to SEQ ID NO: 2973

SEQ ID NO: 2987 - protein, 277 aa, Synthetic construct; identical to SEQ ID NO: 2980

SEQ ID NO: 2988 - protein, 277 aa, Synthetic construct
MFHYVDVGPRDGTPVLFLHGNPTSSYVWRNIIPHVAPTHRCIAPDLIGMGKSDKPDLGYFFDDHVRFMDAFIEALGLEEVVLVIHDWGSALGFHWAKRNPERVKGIAFMEFIRPIPTWDEWPEFARETFQAFRTTDVGRKLIIDQNVFIEGTLPMGVVRPLTEVEMDHYREPFLNPEDREPLWRFPNELPIAGEPANIVKLVEEYMDWLHQSPVPKLLFWGTPGVLIPPAEAARLAKSLPNCKAVDIGPGLNLLQEDNPDLIGSEIARWLSTLEISG

SEQ ID NO: 2989 - protein, 277 aa, Synthetic construct; identical to SEQ ID NO: 2946

SEQ ID NO: 2990 - protein, 277 aa, Synthetic construct; identical to SEQ ID NO: 2953

SEQ ID NO: 2991 - protein, 277 aa, Synthetic construct; identical to SEQ ID NO: 2960

SEQ ID NO: 2992 - protein, 277 aa, Synthetic construct; identical to SEQ ID NO: 2967

SEQ ID NO: 2993 - protein, 277 aa, Synthetic construct; identical to SEQ ID NO: 2974

SEQ ID NO: 2994 - protein, 277 aa, Synthetic construct; identical to SEQ ID NO: 2981

SEQ ID NO: 2995 - protein, 277 aa, Synthetic construct; identical to SEQ ID NO: 2988

SEQ ID NO: 2996 - protein, 277 aa, Synthetic construct
MFHYVDVGPRDGTPVLFLHGNPTSSYVWRNIIPHVSPTHRCIAPDLIGMGKSGKPDLGYFFDDHVRFMDAFIEALGLEEVVLVIHDWGSALGFHWAKRNPERVKGIAFMEFIRPIPTWDEWPEFARETFQAFRTTDVGRKLIIDQNVFIEGTLPMGVVRPLTEVEMDHYREPFLNPADREPLWRFPNELPIAGEPANIVALVEEYMDWLHQSPVPKLLFWGTPGVLIPPAEAARLAKSLPNCKAVDIGPGLNLLQEDNPDLIGSEIARWLSTLEISG

SEQ ID NO: 2997 - protein, 277 aa, Synthetic construct
MFHYVDEGPRDGTPVLFLHGNPTSSYVWRNIIPHVSPTHRCIAPDLIGMGKSDKPDLGYFFDDHVRFMDAFIEALGLEEVVLVIHDWGSALGFHWAKRNPERVKGIAFMEFIRPIPTWDEWPEFARETFQAFRTTDVGRKLIIDQNVFIEGTLPMGVVRPLTEVEMDHYREPFLNPADREPLWRFPNELPIAGEPANIVALVEEYMDWLHQSPVPKLLFWGTPGVLIPPAEAARLAKSLPNCKAVDIGPGLNLLQEDNPDLIGSEIARWLSTLEISG

SEQ ID NO: 2998 - protein, 277 aa, Synthetic construct
MFHYVDEGPRDGTPVLFLHGNPTSSYVWRNIIPHVSPTHRCIAPDLIGMGKSGKPDLGYFFDDHVRFMDAFIEALGLEEVVLVIHDWGSALGFHWAKRNPERVKGIAFMEFIRPIPTWDEWPEFARETFQAFRTTDVGRKLIIDQNVFIEGTLPMGVVRPLTEVEMDHYREPFLNPADREPLWRFPNELPIAGEPANIVALVEEYMDWLHQSPVPKLLFWGTPGVLIPPAEAARLAKSLPNCKAVDIGPGLNLLQEDNPDLIGSEIARWLSTLEISG

SEQ ID NO: 2999 - protein, 277 aa, Synthetic construct
MFHYVDEGPRDGTPVLFLHGNPTSSYVWRNIIPHVSPTHRCIAPDLIGMGKSDKPDLGYFFDDHVRFMDAFIEALGLEEVVLVIHDWGSALGFHWAKRNPERVKGIAFMEFIRPIPTWDEWPEFARETFQAFRTTDVGRKLIIDQNVFIEGTLPMGVVRPLTEVEMDHYREPFLNPADREPLWRFPNELPIAGEPANIVALVEEYMDWLHQSPVPKLLFWGTPGVLIPPAEAARLAKSLPNCKAVDIGPGLNLLQEDNPDLIGAEIARWLSTLEISG

SEQ ID NO: 3000 - protein, 277 aa, Synthetic construct
MFHYVDEGPRDGTPVLFLHGNPTSSYVWRNIIPHVSPTHRCIAPDLIGMGKSDKPDLGYFFDDHVRFMDAFIEALGLEEVVLVIHDWGSALGFHWAKRNPERVKGIAFMEFIRPIPTWDEWPEFARETFQAFRTTDVGRKLIIDQNVFIEGTLPMGVVRPLTEVEMDHYREPFLNPADREPLWRFPNELPIAGEPANIVALVEEYMDWLHQSPVPKLLFWGTPGVLIPPAEAARLAKTLPNCKAVDIGPGLNLLQEDNPDLIGSEIARWLSTLEISG

SEQ ID NO: 3001 - protein, 277 aa, Synthetic construct
MFHYVDVGPRDGTPVLFLHGNPTSSYVWRNIIPHVSPTHRCIAPDLIGMGKSGKPDLGYFFDDHVRFMDAFIEALGLEEVVLVIHDWGSALGFHWAKRNPERVKGIAFMEFIRPIPTWDEFPEFARETFQAFRTTDVGRKLIIDQNVFIEGTLPMGVVRPLTEVEMDHYREPFLNPADREPLWRFPNELPIAGEPANVVALVEEYMDWLHQSPVPKLLFWGTPGVLIPPAEAARLAKSLPNCKAVDIGPGLNLLQEDNPDLIGSEIARWLSTLEISG

SEQ ID NO: 3002 - protein, 277 aa, Synthetic construct
MFHYVDVGPRDGTPVLFLHGNPTSSYVWRNIIPHVSPTHRCIAPDLIGMGKSGKPDLGYFFDDHVRFMDAFIEALGLEEVVLVIHDWGSALGFHWAKRNPERVKGIAFMEFIRPIPTWDEWPEFARETFQAFRTTDVGRKLIIDQNVFIEGTLPMGVVRPLTEVEMDHYREPFLNPADREPLWRFPNELPIAGEPANVVALVEEYMDWLHQSPVPKLLFWGTPGVLIPPAEAARLAKSLPNCKAVDIGPGLNLLQEDNPDLIGSEIARWLSTLEISG

SEQ ID NO: 3003 - protein, 277 aa, Synthetic construct
MFHYVDEGPRDGTPVLFLHGNPTSSYVWRNIIPHVSPTHRCIAPDLIGMGKSGKPDLGYFFDDHVRFMDAFIEALGLEEVVLVIHDWGSALGFHWAKRNPERVKGIAFMEFIRPIPTWDEWPEFARETFQAFRTTDVGRKLIIDQNVFIEGTLPMGVVRPLTEVEMDHYREPFLNPADREPLWRFPNELPIAGEPANIVALVEEYMDWLHQSPVPKLLFWGTPGVLIPPAEAARLAKSLPNCKAVDIGPGLNLLQEDNPDLIGAEIARWLSTLEISG

SEQ ID NO: 3004 - protein, 277 aa, Synthetic construct
MFHYVDVGPRDGTPVLFLHGNPTSSYVWRNIIPHVAPTHRCIAPDLIGMGKSGKPDLGYFFDDHVRFMDAFIEAMGLEEVVLVIHDWGSALGFHWAKRNPERVKGIAFMEFIRPIPTWDEWPEFARETFQAFRTTDVGRKLIIDQNVFIEGTLPMGVVRPLTEVEMDHYREPFLNPADREPLWRFPNELPIAGEPANIVALVEEYMDWLHQSPVPKLLFWGTPGVLIPPAEAARLAKSLPNCKAVDIGPGLNLLQEDNPDLIGSEIARWLSTLEISG

SEQ ID NO: 3005 - protein, 277 aa, Synthetic construct
MFHYVDVGPRDGTPVLFLHGNPTSSYVWRNIIPHVAPTHRCIAPDLIGMGKSGKPDLGYFFDDHVRFMDAFIEALGLEEVVLVIHDWGAALGFHWAKRNPERVKGIAFMEFIRPIPTWDEWPEFARETFQAFRTTDVGRKLIIDQNVFIEGTLPMGVVRPLTEVEMDHYREPFLNPADREPLWRFPNELPIAGEPANIVALVEEYMDWLHQSPVPKLLFWGTPGVLIPPAEAARLAKSLPNCKAVDIGPGLNLLQEDNPDLIGSEIARWLSTLEISG

SEQ ID NO: 3006 - protein, 277 aa, Synthetic construct
MFHYVDVGPRDGTPVLFLHGNPTSSYVWRNIIPHVAPTHRCIAPDLIGMGKSGKPDLGYFFDDHVRFMDAFIEALGLEEVVLVIHDWGSALGFHWAKRYPERVKGIAFMEFIRPIPTWDEWPEFARETFQAFRTTDVGRKLIIDQNVFIEGTLPMGVVRPLTEVEMDHYREPFLNPADREPLWRFPNELPIAGEPANIVALVEEYMDWLHQSPVPKLLFWGTPGVLIPPAEAARLAKSLPNCKAVDIGPGLNLLQEDNPDLIGSEIARWLSTLEISG

SEQ ID NO: 3007 - protein, 277 aa, Synthetic construct
MFHYVDVGPRDGTPVLFLHGNPTSSYVWRNIIPHVSPTHRCIAPDLIGMGKSGKPDLGYFFDDHVRFMDAFIEAMGLEEVVLVIHDWGSALGFHWAKRNPERVKGIAFMEFIRPIPTWDEWPEFARETFQAFRTTDVGRKLIIDQNVFIEGTLPMGVVRPLTEVEMDHYREPFLNPADREPLWRFPNELPIAGEPANIVALVEEYMDWLHQSPVPKLLFWGTPGVLIPPAEAARLAKSLPNCKAVDIGPGLNLLQEDNPDLIGSEIARWLSTLEISG

SEQ ID NO: 3008 - protein, 277 aa, Synthetic construct
MFHYVDVGPRDGTPVLFLHGNPTSSYVWRNIIPHVSPTHRCIAPDLIGMGKSGKPDLGYFFDDHVRFMDAFIEALGLEEVVLVIHDWGAALGFHWAKRNPERVKGIAFMEFIRPIPTWDEWPEFARETFQAFRTTDVGRKLIIDQNVFIEGTLPMGVVRPLTEVEMDHYREPFLNPADREPLWRFPNELPIAGEPANIVALVEEYMDWLHQSPVPKLLFWGTPGVLIPPAEAARLAKSLPNCKAVDIGPGLNLLQEDNPDLIGSEIARWLSTLEISG

SEQ ID NO: 3009 - protein, 277 aa, Synthetic construct
MFHYVDVGPRDGTPVLFLHGNPTSSYVWRNIIPHVSPTHRCIAPDLIGMGKSGKPDLGYFFDDHVRFMDAFIEALGLEEVVLVIHDWGSALGFHWAKRYPERVKGIAFMEFIRPIPTWDEWPEFARETFQAFRTTDVGRKLIIDQNVFIEGTLPMGVVRPLTEVEMDHYREPFLNPADREPLWRFPNELPIAGEPANIVALVEEYMDWLHQSPVPKLLFWGTPGVLIPPAEAARLAKSLPNCKAVDIGPGLNLLQEDNPDLIGSEIARWLSTLEISG

SEQ ID NO: 3010 - protein, 277 aa, Synthetic construct
MMHYVDEGPRDGTPVLFLHGNPTSSYVWRNIIPHVAPTHRCIAPDLIGMGKSDKPDLGYFFDDHVRFMDAFIEALGLEEVVLVIHDWGSALGFHWAKRNPERVKGIAFMEFIRPIPTWDEWPEFARETFQAFRTTDVGRKLIIDHNVFIEGTLRMGVVRPLTEVEMDHYREPFLNPVDREPLWRFPNELPIAGEPANIVALVEEYMDWLHQSPVPKLLFWGTPGVLIPPAEAARLAKTLPNCKAVDIGPGLNLLQEDNPDLIGAEIARWLSTLEISG

SEQ ID NO: 3011 - protein, 277 aa, Synthetic construct
MMHYVDEGPRDGTPVLFLHGNPTSSYVWRNIIPHVAPTHRCIAPDLIGMGKSGKPDLGYFFDDHVRFMDAFIEALGLEEVVLVIHDWGSALGFHWAKRNPERVKGIAFMEFIRPIPTWDEWPEFARETFQAFRTTDVGRKLIIDHNVFIEGTLRMGVVRPLTEVEMDHYREPFLNPVDREPLWRFPNELPIAGEPANIVALVEEYMDWLHQSPVPKLLFWGTPGVLIPPAEAARLAKTLPNCKAVDIGPGLNLLQEDNPDLIGSEIARWLSTLEISG

SEQ ID NO: 3012 - protein, 277 aa, Synthetic construct
MMHYVDEGPRDGTPVLFLHGNPTSSYVWRNIIPHVAPTHRCIAPDLIGMGKSDKPDLGYFFDDHVRFMDAFIEALGLEEVVLVIHDWGSALGFHWAKRNPERVKGIAFMEFIRPIPTWDEWPEFARETFQAFRTTDVGRKLIIDHNVFIEGTLRMGVVRPLTEVEMDHYREPFLNPADREPLWRFPNELPIAGEPANIVALVEEYMDWLHQSPVPKLLFWGTPGVLIPPAEAARLAKTLPNCKAVDIGPGLNLLQEDNPDLIGSEIARWLSTLEISG

SEQ ID NO: 3013 - protein, 277 aa, Synthetic construct
MMHYVDEGPRDGTPVLFLHGNPTSSYVWRNIIPHVAPTHRCIAPDLIGMGKSDKPDLGYFFDDHVRFMDAFIEALGLEEVVLVIHDWGSALGFHWAKRNPERVKGIAFMEFIRPIPTWDEFPEFARETFQAFRTTDVGRKLIIDHNVFIEGTLRMGVVRPLTEVEMDHYREPFLNPVDREPLWRFPNELPIAGEPANIVALVEEYMDWLHQSPVPKLLFWGTPGVLIPPAEAARLAKTLPNCKAVDIGPGLNLLQEDNPDLIGSEIARWLSTLEISG

SEQ ID NO: 3014 - protein, 277 aa, Synthetic construct
MMHYVDEGPRDGTPVLFLHGNPTSSYVWRNIIPHVAPTHRCIAPDLIGMGKSDKPDLGYFFDDHVRFMDAFIEALGLEEVVLVIHDWGSALGFHWAKRNPERVKGIAFMEFIRPIPTWDEWPEFARETFQAFRTTDVGRKLIIDHNVFIEGTLRMGVVRPLTEVEMDHYREPFLNPVDREPLWRFPNELPIAGEPANVVALVEEYMDWLHQSPVPKLLFWGTPGVLIPPAEAARLAKTLPNCKAVDIGPGLNLLQEDNPDLIGSEIARWLSTLEISG

SEQ ID NO: 3015 - protein, 277 aa, Synthetic construct
MMHYVDEGPRDGTPVLFLHGNPTSSYVWRNIIPHVAPTHRCIAPDLIGMGKSGKPDLGYFFDDHVRFMDAFIEALGLEEVVLVIHDWGSALGFHWAKRNPERVKGIAFMEFIRPIPTWDEWPEFARETFQAFRTTDVGRKLIIDHNVFIEGTLRMGVVRPLTEVEMDHYREPFLNPADREPLWRFPNELPIAGEPANIVALVEEYMDWLHQSPVPKLLFWGTPGVLIPPAEAARLAKTLPNCKAVDIGPGLNLLQEDNPDLIGSEIARWLSTLEISG

SEQ ID NO: 3016 - protein, 277 aa, Synthetic construct
MMHYVDEGPRDGTPVLFLHGNPTSSYVWRNIIPHVAPTHRCIAPDLIGMGKSDKPDLGYFFDDHVRFMDAFIEALGLEEVVLVIHDWGSALGFHWAKRNPERVKGIAFMEFIRPIPTWDEFPEFARETFQAFRTTDVGRKLIIDHNVFIEGTLRMGVVRPLTEVEMDHYREPFLNPVDREPLWRFPNELPIAGEPANVVALVEEYMDWLHQSPVPKLLFWGTPGVLIPPAEAARLAKTLPNCKAVDIGPGLNLLQEDNPDLIGSEIARWLSTLEISG

SEQ ID NO: 3017 - protein, 277 aa, Synthetic construct
MMHYVDEGPRDGTPVLFLHGNPTSSYVWRNIIPHVAPTHRCIAPDLIGMGKSGKPDLGYFFDDHVRFMDAFIEALGLEEVVLVIHDWGSALGFHWAKRNPERVKGIAFMEFIRPIPTWDEWPEFARETFQAFRTTDVGRKLIIDHNVFIEGTLRMGVVRPLTEVEMDHYREPFLNPVDREPLWRFPNELPIAGEPANIVALVEEYMDWLHQSPVPKLLFWGTPGVLIPPAEAARLAKSLPNCKAVDIGPGLNLLQEDNPDLIGAEIARWLSTLEISG

SEQ ID NO: 3018 - protein, 277 aa, Synthetic construct
MMHYVDEGPRDGTPVLFLHGNPTSSYVWRNIIPHVAPTHRCIAPDLIGMGKSDKPDLGYFFDDHVRFMDAFIEALGLEEVVLVIHDWGSALGFHWAKRNPERVKGIAFMEFIRPIPTWDEWPEFARETFQAFRTTDVGRKLIIDHNVFIEGTLRMGVVRPLTEVEMDHYREPFLNPADREPLWRFPNELPIAGEPANIVALVEEYMDWLHQSPVPKLLFWGTPGVLIPPAEAARLAKSLPNCKAVDIGPGLNLLQEDNPDLIGAEIARWLSTLEISG

SEQ ID NO: 3019 - protein, 277 aa, Synthetic construct
MMHYVDEGPRDGTPVLFLHGNPTSSYVWRNIIPHVAPTHRCIAPDLIGMGKSDKPDLGYFFDDHVRFMDAFIEALGLEEVVLVIHDWGSALGFHWAKRNPERVKGIAFMEFIRPIPTWDEFPEFARETFQAFRTTDVGRKLIIDHNVFIEGTLRMGVVRPLTEVEMDHYREPFLNPVDREPLWRFPNELPIAGEPANIVALVEEYMDWLHQSPVPKLLFWGTPGVLIPPAEAARLAKSLPNCKAVDIGPGLNLLQEDNPDLIGAEIARWLSTLEISG

SEQ ID NO: 3020 - protein, 277 aa, Synthetic construct
MMHYVDEGPRDGTPVLFLHGNPTSSYVWRNIIPHVAPTHRCIAPDLIGMGKSDKPDLGYFFDDHVRFMDAFIEALGLEEVVLVIHDWGSALGFHWAKRNPERVKGIAFMEFIRPIPTWDEWPEFARETFQAFRTTDVGRKLIIDHNVFIEGTLRMGVVRPLTEVEMDHYREPFLNPVDREPLWRFPNELPIAGEPANVVALVEEYMDWLHQSPVPKLLFWGTPGVLIPPAEAARLAKSLPNCKAVDIGPGLNLLQEDNPDLIGAEIARWLSTLEISG

SEQ ID NO: 3021 - protein, 277 aa, Synthetic construct
MMHYVDEGPRDGTPVLFLHGNPTSSYVWRNIIPHVAPTHRCIAPDLIGMGKSGKPDLGYFFDDHVRFMDAFIEALGLEEVVLVIHDWGSALGFHWAKRNPERVKGIAFMEFIRPIPTWDEWPEFARETFQAFRTTDVGRKLIIDHNVFIEGTLRMGVVRPLTEVEMDHYREPFLNPADREPLWRFPNELPIAGEPANIVALVEEYMDWLHQSPVPKLLFWGTPGVLIPPAEAARLAKSLPNCKAVDIGPGLNLLQEDNPDLIGAEIARWLSTLEISG

SEQ ID NO: 3022 - protein, 277 aa, Synthetic construct
MMHYVDEGPRDGTPVLFLHGNPTSSYVWRNIIPHVAPTHRCIAPDLIGMGKSDKPDLGYFFDDHVRFMDAFIEALGLEEVVLVIHDWGSALGFHWAKRNPERVKGIAFMEFIRPIPTWDEFPEFARETFQAFRTTDVGRKLIIDHNVFIEGTLRMGVVRPLTEVEMDHYREPFLNPVDREPLWRFPNELPIAGEPANVVALVEEYMDWLHQSPVPKLLFWGTPGVLIPPAEAARLAKSLPNCKAVDIGPGLNLLQEDNPDLIGAEIARWLSTLEISG

SEQ ID NO: 3023 - protein, 277 aa, Synthetic construct
MMHYVDEGPRDGTPVLFLHGNPTSSYVWRNIIPHVAPTHRCIAPDLIGMGKSGKPDLGYFFDDHVRFMDAFIEALGLEEVVLVIHDWGSALGFHWAKRNPERVKGIAFMEFIRPIPTWDEWPEFARETFQAFRTTDVGRKLIIDHNVFIEGTLRMGVVRPLTEVEMDHYREPFLNPADREPLWRFPNELPIAGEPANIVALVEEYMDWLHQSPVPKLLFWGTPGVLIPPAEAARLAKSLPNCKAVDIGPGLNLLQEDNPDLIGSEIARWLSTLEISG

SEQ ID NO: 3024 - protein, 277 aa, Synthetic construct
MMHYVDVGPRDGTPVLFLHGNPTSSYVWRNIIPHVAPTHRCIAPDLIGMGKSGKPDLGYFFDDHVRFMDAFIEALGLEEVVLVIHDWGSALGFHWAKRNPERVKGIAFMEFIRPIPTWDEWPEFARETFQAFRTTDVGRKLIIDHNVFIEGTLRMGVVRPLTEVEMDHYREPFLNPADREPLWRFPNELPIAGEPANIVALVEEYMDWLHQSPVPKLLFWGTPGVLIPPAEAARLAKTLPNCKAVDIGPGLNLLQEDNPDLIGSEIARWLSTLEISG

SEQ ID NO: 3025 - protein, 277 aa, Synthetic construct
MMHYVDVGPRDGTPVLFLHGNPTSSYVWRNIIPHVAPTHRCIAPDLIGMGKSGKPDLGYFFDDHVRFMDAFIEALGLEEVVLVIHDWGSALGFHWAKRNPERVKGIAFMEFIRPIPTWDEWPEFARETFQAFRTTDVGRKLIIDHNVFIEGTLRMGVVRPLTEVEMDHYREPFLNPADREPLWRFPNELPIAGEPANIVALVEEYMDWLHQSPVPKLLFWGTPGVLIPPAEAARLAKSLPNCKAVDIGPGLNLLQEDNPDLIGAEIARWLSTLEISG

SEQ ID NO: 3026 - protein, 277 aa, Synthetic construct
MMHYVDVGPRDGTPVLFLHGNPTSSYVWRNIIPHVAPTHRCIAPDLIGMGKSGKPDLGYFFDDHVRFMDAFIEALGLEEVVLVIHDWGSALGFHWAKRNPERVKGIAFMEFIRPIPTWDEFPEFARETFQAFRTTDVGRKLIIDHNVFIEGTLRMGVVRPLTEVEMDHYREPFLNPADREPLWRFPNELPIAGEPANIVALVEEYMDWLHQSPVPKLLFWGTPGVLIPPAEAARLAKSLPNCKAVDIGPGLNLLQEDNPDLIGSEIARWLSTLEISG

SEQ ID NO: 3027 - protein, 277 aa, Synthetic construct
MMHYVDVGPRDGTPVLFLHGNPTSSYVWRNIIPHVAPTHRCIAPDLIGMGKSGKPDLGYFFDDHVRFMDAFIEALGLEEVVLVIHDWGSALGFHWAKRNPERVKGIAFMEFIRPIPTWDEWPEFARETFQAFRTTDVGRKLIIDHNVFIEGTLRMGVVRPLTEVEMDHYREPFLNPADREPLWRFPNELPIAGEPANVVALVEEYMDWLHQSPVPKLLFWGTPGVLIPPAEAARLAKSLPNCKAVDIGPGLNLLQEDNPDLIGSEIARWLSTLEISG

SEQ ID NO: 3028 - protein, 277 aa, Synthetic construct
MMHYVDVGPRDGTPVLFLHGNPTSSYVWRNIIPHVAPTHRCIAPDLIGMGKSGKPDLGYFFDDHVRFMDAFIEALGLEEVVLVIHDWGSALGFHWAKRNPERVKGIAFMEFIRPIPTWDEFPEFARETFQAFRTTDVGRKLIIDHNVFIEGTLRMGVVRPLTEVEMDHYREPFLNPADREPLWRFPNELPIAGEPANVVALVEEYMDWLHQSPVPKLLFWGTPGVLIPPAEAARLAKSLPNCKAVDIGPGLNLLQEDNPDLIGSEIARWLSTLEISG

SEQ ID NO: 3029 - protein, 277 aa, Synthetic construct
MMHYVDVGPRDGTPVLFLHGNPTSSYVWRNIIPHVAPTHRCIAPDLIGMGKSGKPDLGYFFDDHVRFMDAFIEALGLEEVVLVIHDWGSALGFHWAKRNPERVKGIAFMEFIRPIPTWDEWPEFARETFQAFRTTDVGRKLIIDHNVFIEGTLRMGVVRPLTEVEMDHYREPFLNPADREPLWRFPNELPIAGEPANIVALVEEYMDWLHQSPVPKLLFWGTPGVLIPPAEAARLAKTLPNCKAVDIGPGLNLLQEDNPDLIGAEIARWLSTLEISG

SEQ ID NO: 3030 - protein, 277 aa, Synthetic construct
MMHYVDEGPRDGTPVLFLHGNPTSSYVWRNIIPHVAPTHRCIAPDLIGMGKSDKPDLGYFFDDHVRFMDAFIEALGLEEVVLVIHDWGSALGFHWAKRNPERVKGIAFMEFIRPIPTWDEFPEFARETFQAFRTTDVGRKLIIDHNVFIEGTLRMGVVRPLTEVEMDHYREPFLNPVDREPLWRFPNELPIAGEPANVVALVEEYMDWLHQSPVPKLLFWGTPGVLIPPAEAARLAKSLPNCKAVDIGPGLNLLQEDNPDLIGSEIARWLSTLEISG

SEQ ID NO: 3031 - protein, 277 aa, Synthetic construct
MMHYVDVGPRDGTPVLFLHGNPTSSYVWRNIIPHVAPTHRCIAPDLIGMGKSDKPDLGYFFDDHVRFMDAFIEALGLEEVVLVIHDWGSALGFHWAKRNPERVKGIAFMEFIRPIPTWDEFPEFARETFQAFRTTDVGRKLIIDHNVFIEGTLRMGVVRPLTEVEMDHYREPFLNPVDREPLWRFPNELPIAGEPANVVALVEEYMDWLHQSPVPKLLFWGTPGVLIPPAEAARLAKSLPNCKAVDIGPGLNLLQEDNPDLIGAEIARWLSTLEISG

SEQ ID NO: 3032 - protein, 277 aa, Synthetic construct
MMHYVDVGPRDGTPVLFLHGNPTSSYVWRNIIPHVAPTHRCIAPDLIGMGKSGKPDLGYFFDDHVRFMDAFIEALGLEEVVLVIHDWGSALGFHWAKRNPERVKGIAFMEFIRPIPTWDEFPEFARETFQAFRTTDVGRKLIIDHNVFIEGTLRMGVVRPLTEVEMDHYREPFLNPVDREPLWRFPNELPIAGEPANVVALVEEYMDWLHQSPVPKLLFWGTPGVLIPPAEAARLAKSLPNCKAVDIGPGLNLLQEDNPDLIGSEIARWLSTLEISG

SEQ ID NO: 3033 - protein, 277 aa, Synthetic construct
MMHYVDVGPRDGTPVLFLHGNPTSSYVWRNIIPHVAPTHRCIAPDLIGMGKSDKPDLGYFFDDHVRFMDAFIEALGLEEVVLVIHDWGSALGFHWAKRNPERVKGIAFMEFIRPIPTWDEFPEFARETFQAFRTTDVGRKLIIDHNVFIEGTLRMGVVRPLTEVEMDHYREPFLNPADREPLWRFPNELPIAGEPANVVALVEEYMDWLHQSPVPKLLFWGTPGVLIPPAEAARLAKSLPNCKAVDIGPGLNLLQEDNPDLIGSEIARWLSTLEISG

SEQ ID NO: 3034-3035 - skipped (2 entries)
